(19) United States
(12) Patent Application Publication
(10) Pub. No.: US 2024/0293525 A1
(43) Pub. Date: Sep. 5, 2024

(54) VACCINE AGAINST AFRICAN SWINE FEVER VIRUS INFECTION

(71) Applicants: The Pirbright Institute, Woking (GB); Kumamoto University, Kumamoto (GB); The Chancellor Masters and Scholars of the University of Oxford, Oxford (GB)

(72) Inventors: Linda Dixon, Woking (GB); Ana Reis, Woking (GB); Anusyah Rathakrishnan, Woking (GB); Simon Davis, Oxford (GB); Yuan Jenq Lui, Oxford (GB); Shinji Ikemizu, Kumamoto (JP)

(21) Appl. No.: 17/905,490

(22) PCT Filed: Mar. 5, 2021
(86) PCT No.: PCT/GB2021/050562

§ 371 Date: Sep. 1, 2022

(30) Foreign Application Priority Data
Mar. 6, 2020 (GB) 2003289.2
Mar. 6, 2020 (GB) 2003292.6
Apr. 22, 2020 (GB) 2005878.0
Apr. 22, 2020 (GB) 2005880.6
Aug. 28, 2020 (GB) 2013541.4

(51) Int. Cl. A61K 39/12; A61K 39/00; A61P 37/04; C12N 7/00

(52) U.S. Cl. CPC A61K 39/12; A61P 37/04; C12N 7/00; A61K 2039/5254; A61K 2039/552; A61K 2039/575; C12N 2710/12034; C12N 2710/12061

(57) ABSTRACT

The present invention relates to attenuated African Swine Fever viruses. The attenuated viruses protect pigs against subsequent challenge with virulent virus. The present invention also relates to the use of such attenuated viruses to treat and/or prevent African Swine Fever. The invention also relates to EP402R proteins of African Swine Fever virus comprising particular amino acid substitutions, as well as polynucleotides encoding such proteins and African Swine Fever viruses comprising such proteins.

### FIELD OF THE INVENTION

[0001] The present invention relates to attenuated African Swine Fever viruses. The attenuated viruses protect pigs against subsequent challenge with virulent virus. The present invention also relates to the use of such attenuated viruses to treat and/or prevent African Swine Fever. The invention also relates to EP402R proteins of African Swine Fever virus comprising particular amino acid substitutions, as well as polynucleotides encoding such proteins and African Swine Fever viruses comprising such proteins.

### BACKGROUND TO THE INVENTION

### African Swine Fever (ASF)

[0002] African swine fever is a devastating haemorrhagic disease of domestic pigs caused by a double-stranded DNA virus, African swine fever virus (ASFV). ASFV is the only member of the Asfarviridae family and replicates predominantly in the cytoplasm of cells. Virulent strains of ASFV can kill domestic pigs within about 5-14 days of infection with a mortality rate approaching 100%.

[0003] ASFV can infect and replicate in warthogs (Phacochoerus sp.), bushpigs (Potamocherus sp.) and soft ticks of the Ornithodoros species (which are thought to be a vector), but in these species few if any clinical signs are observed and long term persistent infections can be established. ASFV was first described after European settlers brought pigs into areas endemic with ASFV and, as such, is an example of an “emerging infection”. The disease is currently endemic in many sub-Saharan countries and in Europe in Sardinia. Following its introduction to Georgia in the Trans Caucasus region in 2007, ASFV has spread extensively through neighbouring countries including the Russian Federation. In 2012 the first outbreak was reported in Ukraine and in 2013 the first outbreaks in Belarus. In 2014 further outbreaks were reported in pigs in Ukraine and detection in wild boar in Lithuania and Poland. In 2018 ASFV spread to China and has since spread extensively in China and a number of other Asian countries (Mongolia, Vietnam, Cambodia, Myanmar, N and S Korea, Indonesia, Philippines, Papua New Guinea and Timor-Leste).

[0004] There is currently no treatment for ASF. Prevention in countries outside Africa has been attempted on a national basis by restrictions on incoming pigs and pork products, compulsory boiling of waste animal products under license before feeding to pigs and the application of a slaughter policy when the disease is diagnosed. Prevention in Africa is based on measures to keep warthogs and materials contaminated by warthogs away from the herd.

[0005] There is thus a need for improved measures to control ASFV infection and prevent spread of the disease.

### African Swine Fever Virus (ASFV)

[0006] The complete genome sequences of ASFV isolate Benin 97/1 (a highly pathogenic virus from West Africa, Group1), isolate OURT88/3 (non-pathogenic, attenuated virus from Portugal, Group 1) and isolate BA71V (Vero cell tissue culture adapted non-pathogenic virus, Group 1) have been compared (Chapman et al. 2008 J. Gen. Virol. 89: 397-408). The complete genome of genotype II isolate Georgia 2007/1 has also been sequenced (Chapman et al. 2011 Emerg Infect Dis 17(4): 599-605)

[0007] In the OURT88/3 genome, the multigene family (MGF) 360 18R (DP148R) gene, EP153R gene and EP402R gene are each interrupted by frameshift mutations. Additionally, the following MGF genes are absent from the OURT88/3 genome: MGF 110 3L, 6L, 7L, 8L, 10L, 11L and 12L, MGF 300 3L, MGF 360 5L, 6L, 7L, 10L, 11L, 12L, 13L, 14L, 20R, 21R and 22R, and MGF 505 1R, 2R and 6R. The MGF 505 3R gene is also truncated.

[0008] The sequences of the high-virulence Lisboa60 strain and the low-virulence NH/P68 strain have also been compared (Portugal et al. 2015 J. Gen. Virol. 96: 408-419).

[0009] In the NH/P68 genome, the MGF 360 18R (DP148R) gene, EP153R gene and EP402R gene are each interrupted by a premature stop codon. Additionally, the following MGF genes are absent from the NH/P68 genome: MGF 110 3L, 6L, 7L, 8L, 10L, 11L and 12L, MGF 360 5L, 6L, 7L, 10L, 11L, 12L, 13L, 14L, 20R, 21R and 22R, and MGF 505 1R, 2R and 6R. The MGF 360 9L and MGF 505 3R genes are also truncated.

[0010] The sequences of the high-virulence BA71 strain and the low-virulence BA71V strain have also been compared (Rodríguez et al. 2015 PLOS ONE 10(11): e0142889).

[0011] Deletion of the DP148R gene from the virulent Benin 97/1 isolate reduced virulence and induced protection against challenge with the parental virus (Reis et al. 2017 J. Virol. 91, 24: e01428-17).

### Differentiation of Infected and Vaccinated Animals (DIVA) Vaccines

[0012] A DIVA vaccine (also referred to as a marker vaccine) allows differentiation of animals that have been infected with a wild type pathogen from animals that have been immunised with the vaccine. DIVA vaccines lack at least one immunogenic antigen (a DIVA marker) which is present in the wild type pathogen. Animals infected with the wild type pathogen produce antibodies against the DIVA marker, whereas vaccinated animals do not. Antibodies to the DIVA marker may be detected using a serological assay. Infected animals (which have antibodies to the DIVA marker) may thus be differentiated from vaccinated animals (which do not have antibodies to the DIVA marker), despite both groups of animals having antibodies to other immunogens of the pathogen.

[0013] A DIVA marker should be immunogenic, but deletion of the gene should not affect the vaccine's protective capacity.

### SUMMARY OF THE INVENTION

[0014] Generally, the invention relates to an attenuated African Swine Fever virus in which expression and/or activity of the genes EP153R and EP402R is disrupted, whilst expression and/or activity of particular MGF genes is not disrupted.

[0015] The invention also relates to the determination that disruption of expression and/or activity of the EP153R and EP402R genes in combination with a Differentiation of Infected from Vaccinated Animals (DIVA) mutation can attenuate African Swine Fever virus. The invention concerns particularly a DIVA mutation in the K145R gene.

[0016] The invention also relates to the determination of particular amino acid changes in the EP402R protein of African Swine Fever virus which disrupt haemadsorption. Accordingly, the invention includes EP402R proteins comprising such amino acid changes, polynucleotides encoding such proteins and African Swine Fever virus comprising such EP402R proteins and polynucleotides.

[0017] Furthermore, the invention concerns the combination of the foregoing, in that the amino acid changes in EP402R may be combined with disruption of the activity and/or expression of the EP153R gene and/or a DIVA mutation to attenuate African Swine Fever virus.

[0018] The attenuated African Swine Fever viruses of the invention are of particular benefit as when used in a vaccine they provide protection against infection by wild type African Swine Fever virus strains, as demonstrated in the Examples herein.

[0019] In one aspect the invention provides an attenuated African Swine Fever (ASF) virus in which the expression and/or activity of the genes EP153R and EP402R is disrupted; and which comprises a functional version of one or more of the following genes:
[0020] multigene family (MGF) 110 3L, 6L, 7L, 8L, 10L, 11L and 12L,
[0021] MGF 360 5L, 6L, 7L, 10L, 11L, 12L, 13L, 14L, 20R, 21R and 22R, and
[0022] MGF 505 1R, 2R and 6R.

[0023] The invention also provides an attenuated ASF virus in which the expression and/or activity of the genes EP153R and EP402R is disrupted;
[0024] and which comprises a functional version of one or more of the following genes:
   [0025] multigene family (MGF) 110 5L, 6L, 8L and 12L,
   [0026] MGF 360 6L, 10L, 11L, 12L, 13L, 14L and 21R, and
   [0027] MGF 505 1R and 2R.

[0028] The invention also provides an attenuated ASF virus in which the expression and/or activity of the genes EP153R and EP402R is disrupted;
[0029] and which comprises a functional version of one or more of the following genes:
   [0030] multigene family (MGF) 110 11L and 12L,
   [0031] MGF 360 6L, 10L, 11L, 12L, 13L, and 14L, and
   [0032] MGF 505 1R and 2R.

[0033] In another aspect the invention provides an attenuated ASF virus in which the expression and/or activity of the genes EP153R and EP402R is disrupted and which comprises a DIVA mutation. In some embodiments the DIVA mutation disrupts expression of the K145R gene.

[0034] In another aspect the invention provides an EP402R protein comprising one or more amino acid changes in the ligand-binding domain wherein the amino acid changes disrupt ligand-binding of the EP402R protein.

[0035] In another aspect the invention provides an EP402R protein comprising an amino acid change at a position which corresponds to Q96 and/or W99 of the Georgia 2007/1 EP402R protein (SEQ ID No. 24).

[0036] The invention also provides a polynucleotide encoding an EP402R protein of the invention.

[0037] The invention also provides a vector comprising a polynucleotide of the invention.

[0038] In another aspect the invention provides an ASF virus comprising the EP402R protein of the invention. The invention also provides an ASF virus comprising the polynucleotide of the invention.

[0039] The invention also provides the ASF virus of the invention for use in treating and/or preventing a disease in a subject, and the use of an ASF virus of the invention for manufacture of a medicament for treating and/or preventing disease in a subject.

[0040] The invention also provides a pharmaceutical composition comprising an ASF virus of the invention, and such a pharmaceutical composition for use in treating and/or preventing a disease in a subject.

[0041] The invention also provides a vaccine comprising an ASF virus of the invention, and such a vaccine for use in treating and/or preventing African Swine Fever in a subject.

[0042] The invention also provides a method for treating and/or preventing African Swine Fever in a subject which comprises the step of administering to the subject an effective amount of a pharmaceutical composition according to the invention or a vaccine according to the invention.

[0043] In another aspect the invention provides a method of producing an ASF virus of the invention, the method comprising changing one or more amino acid(s) in the ligand-binding domain of the EP402R protein wherein the amino acid change disrupts ligand-binding of the EP402R protein.

[0044] In another aspect the invention provides a method of producing an ASF virus of the invention, the method comprising changing one or more amino acid(s) in the EP402R protein at a position which corresponds to Q96 and/or W99 of the Georgia 2007/1 EP402R protein (SEQ ID No. 24).

[0045] In another aspect the invention provides a method of reducing the ability of an ASF virus to induce haemadsorption, the method comprising changing one or more amino acid(s) in the ligand-binding domain of the EP402R protein wherein the amino acid changes disrupt ligand-binding of the EP402R protein.

[0046] In another aspect the invention provides a method of reducing the ability of an ASF virus to induce haemadsorption, the method comprising changing one or more amino acid(s) in the EP402R protein at a position which corresponds to Q96 and/or W99 of the Georgia 2007/1 EP402R protein (SEQ ID No. 24).

[0047] In another aspect the invention provides a method of attenuating an ASF virus which comprises disrupting the expression and/or activity of the EP153R and EP402R genes.

### DESCRIPTION OF THE FIGURES

[0048] FIG. 1 shows confocal microscopy images of non-permeabilised cells expressing wild-type (A) or mutant (B) CD2v stained with sera from pigs immunised with attenuated ASFV containing a wild-type CD2v gene to detect surface expression.

[0049] FIG. 2 shows exemplary images from a HAD (haemadsorption) assay. Vero cells were infected with modified vaccinia virus Ankara expressing T7RNA polymerase and transfected with plasmids (pcDNA3) expressing wild-type or mutant CD2v full-length proteins with a C-terminal HA epitope tag. Pig red blood cells were added and cells observed for attachment of red blood cells to the surface. HAD of red blood cells is observed around three cells transfected with a plasmid expressing wild-type Benin CD2v (A). Partial HAD is observed around one cell expressing CD2v with the Y102 residue mutated to D (B). No HAD is observed for cells expressing CD2v with residue E99 mutated to R (C).

[0050] FIG. 3 depicts an alignment of the amino acid sequence of CD2v ligand-binding domain from different ASFV isolates of varying genotypes. E99 and corresponding residues in other isolates are highlighted in yellow.

[0051] FIG. 4 shows exemplary images from a HAD assay. Vero cells were infected with modified vaccinia virus Ankara expressing T7RNA polymerase and transfected with plasmids (pcDNA3) expressing wild-type or mutant CD2v full-length proteins from Benin or Georgia strains with a C-terminal HA epitope tag. Pig red blood cells were added and cells observed for attachment of red blood cells to the surface. HAD of red blood cells is observed around four cells transfected with a plasmid expressing wild-type Benin CD2v (A) and around two cells transfected with a plasmid expressing wild-type Georgia CD2v (B). No HAD is observed for cells expressing Georgia CD2v with residue Q96 mutated to R (C) or for untransfected Vero cells (D).

[0052] FIG. 5 shows Vero cells transfected with plasmids expressing K145R (A) or B125R (B). Green staining shows the expressed proteins and blue DAPI stain detects DNA.

[0053] FIG. 6 shows K145R (A) and B125R (B) expressed in Vero cells and detected by antisera from pigs immunised with ASFV. Cells were fixed, permeabilised and stained with anti-HA (red) to detect the expressed proteins and with sera from pigs immunised with an attenuated genotype|Benin97/1 gene deleted ASFV strain (green). Images are shown of cells stained with sera collected before immunisation and at day 38 post-immunisation. DNA is stained in blue.

[0054] FIG. 7 shows exemplary images from HAD assay. Porcine bone marrow cells were infected with wild type Georgia 2007/1 ASFV (A) as control or GeorgiaΔK145RΔEP153RCD2vQ96R ASFV (B) and pig red blood cells added. HAD is observed in cells infected with wild type Georgia 2007/1 at 1 day post-infection (A) but not in cells infected with GeorgiaΔK145RΔEP153RCD2vQ96R at 1 day post-infection (B).

[0055] FIG. 8 depicts the experimental protocol used to immunise, boost and challenge pigs with GeorgiaΔK145RΔEP153RCD2vQ96R ASFV (Group K).

[0056] FIG. 9 shows rectal temperatures of pigs in control, non-immunised Group M (A) and Group K immunised with GeorgiaΔK145RΔEP153RCD2vQ96R (B) during immunisation and challenge.

[0057] FIG. 10 shows clinical scores of pigs in control, non-immunised Group M (A) and Group K immunised with GeorgiaΔK145RΔEP153RCD2vQ96R (B) during immunisation and challenge.

[0058] FIG. 11 shows macroscopic lesions in different organs scored at necropsy in pigs from Group K (immunised with GeorgiaΔK145RΔEP153RCD2vQ96R prior to challenge) and Group M (non-immunised control).

[0059] FIG. 12 shows the antibody response of pigs in Group K during immunisation and challenge (red dashed line) measured using a commercially available competitive ELISA based on the VP72/B646L major capsid protein.

[0060] FIG. 13 shows the cell-mediated immune response in Group K during immunisation and challenge. Peripheral blood mononuclear cells were collected pre-immunization, boost and challenge and stimulated with ASFV genotype|Benin 97/1 (red bars) or ASFV genotype II Georgia 2007/1 (green bars). Numbers of IFN gamma producing cells were measured by Elispot assay.

[0061] FIG. 14 shows the number of IFN gamma producing cells for different pigs following stimulation with Georgia 2007/1 isolate over time.

[0062] FIG. 15 shows levels of infectious virus detected in whole blood at different days post-immunization and challenge (x-axis). Virus titres were measured by limiting dilution in porcine bone marrow cells and infected cells were detected by fluorescence and are given as TCID₅₀ per ml on the y-axis. Values for different pigs are shown in different colours as indicated on the figure.

### DETAILED DESCRIPTION

### African Swine Fever Virus

[0063] African swine fever virus (ASFV) is the causative agent of African swine fever (ASF). The genome structure of ASFV is known in the art, as detailed in Chapman et al. 2008 J. Gen. Virol. 89: 397-408. ASFV is a large, icosahedral, double-stranded DNA virus with a linear genome containing at least 150 genes. The number of genes differs slightly between different isolates of the virus. ASFV has similarities to the other large DNA viruses, e.g., poxvirus, iridovirus and mimivirus. In common with other viral haemorrhagic fevers, the main target cells for replication are those of monocyte, macrophage lineage.

[0064] Based on sequence variation in the C-terminal region of the B646L gene encoding the major capsid protein p72, 22 ASFV genotypes (I-XXII) have been identified. All ASFV p72 genotypes have been circulating in eastern and southern Africa. Genotype I has been circulating in Europe, South America, the Caribbean and western Africa. Genotype II is circulating in a number of countries in Europe and Asia. Genotype IX is confined to several East African countries.

[0065] Examples of strains from some of the genotypes are given below:
[0066] Genotype I: OURT88/3; Brazil/79; Lisbon/60; BA715; Pret; Benin 97/1; IC/1/96; IC/576; CAM/82; Madrid/62; Malta/78; ZAR85; Katange63; Togo; Dakar59; Ourt88/1; BEN/1/97; Dom_Rep; VAL/76; IC/2/96; Awoshie/99; NIG/1/99; NIG/1/98; ANG/70; BEL/85; SPEC120; Lisbon/57; ASFV-Warm; GHA/1/00; GAM/1/00; Ghana; HOL/86; NAM/1/80; NUR/90/1; CAM/4/85; ASFV-Teng; Tegani; ASFV-E75.
[0067] Genotype II: Georgia 2007/1; POL/2015/Podlaskie (Polish strain); Belgium/Etalle/wb/2018; ASFV/Kyiv/2016/131; China/2018/AnhuiXCGQ
[0068] Genotype III: BOT 1/99
[0069] Genotype IV: ASFV-War; RSA/1/99/W
[0070] Genotype VI: MOZ 94/1
[0071] Genotype VII: VICT/90/1; ASFV-Mku; RSA/1/98
[0072] Genotype VIII: NDA/1/90; KAL88/1; ZAM/2/84; JON89/13; KAV89/1; DEZda; AFSV-Mal; Malawi LIL 20/1
[0073] Genotype IX: UGA/1/95
[0074] Genotype X: BUR/1/84; BUR/2/84; BUR/90/1; UGA/3/95; TAN/Kwh12; Hindell; ASFV-Ken; Virulent Uganda 65.

[0075] In an embodiment, the ASF virus of the invention may be attenuated. The attenuated ASF virus of the invention may comprise any of the modifications/mutations described herein, in any combination. The modifications/mutations described herein may attenuate the ASF virus.

### ASFV Isolates

[0076] The attenuated ASF virus of the present invention may be derivable or be derived from a wild-type ASF virus isolate, by including mutations in its genome such that the expression and/or activity of the genes EP153R and EP402R is disrupted. The virus may also include a DIVA mutation, such as a DIVA mutation that disrupts expression of the K145R gene.

[0077] The term “wild-type” indicates that the virus existed (at some point) in the field, and was isolated from a natural host, such as a domestic pig, tick or warthog. ASFV isolates described to date are summarised in Table 1 below, together with their Genbank Accession numbers.

TABLE 1

| Isolate | Country | Host | Year | Virulence | GenBank accession no. |
|---|---|---|---|---|---|
| BA71qqV | Spain | Pig | 1971 | Tissue culture adapted | U18466 |
| Benin 97/1 | Spain | Pig | 1997 | High | AM712239 |
| Georgia 2007/1 | Georgia | Pig | 2007 | High | FR682468 |
| Kenya | Kenya | Pig | 1950 | High | AY261360 |
| Malawi Lil20/1 | Malawi | Tick | 1983 | High | AY261361 |
| Mkuzi | Zululand | Tick | 1978 | Unknown | AY261362 |
| OURT88/3 | Portugal | Tick | 1988 | Low | AM712240 |
| Pretorisuskop/96/4 | South Africa | Tick | 1996 | High | AY261363 |
| Tangani 62 | Malawi | Pig | 1962 | High | AY261364 |
| Warmbaths | South Africa | Tick | 1987 | Unknown | AY261365 |
| Warthog | Namibia | Warthog | 1980 | Unknown | AY261366 |
| Pol16_20186_07 | Poland | Pig | 2018 | High | MG939583 |
| Pig/HLJ/2018 | China | Pig | 2018 | Virulent | MK333180 |
| DB/LN/2018 | China | Dried blood pig feed | 2018 | Unknown | MK333181 |
| Belgium 2018/1 | Belgium | Wild boar | 2018 | Virulent | LR536725 |
| China/2018/AnhuiXCGQ | China | Pig | 2018 | Virulent | MK128995 |
| Ken05/TK1, Ken06 Bus | Kenya | | 2005/06 | Unknown | NC_044945 KM111295 |
| R35, R25, R7, R8, N10 | Uganda | | 2018 | Unknown | MH025920, MH025918, MH025917, |
| | | | | | MH025916, MH025919 |
| Pol_17_03029_C201 | Poland | Pig | 2017 | Unknown | MG939587 |
| 26544/OG10 | Sardinia/Italy | Pig | 2017 | Unknown | KM102979 |
| 47/Ss?2008 | Sardinia/Italy | Pig | 2008 | Unknown | KX354450 |
| Belgium/Etalle/wb/2018 | Belgium | Wild boar | 2018 | Virulent | MK543947 |
| ASFV/Kyiv/2016/131 | Ukraine | Pig | 2016 | Unknown | MN194591 |
| ASFV-SY18 | China | Pig | 2018 | Unknown | MH766894 |
| ASFV_HU_2018 | Hungary | Wild boar | 2019 | Unknown | MN715134 |
| ASFV-wbBS01 | China | Wild boar | 2019 | Unknown | MK645909 |
| ASFV Georgia 2007/1 (new version) | Georgia | Pig | 2007 | Virulent | LR743116 |
| ASFV/pig/China/CAS19-01/2019 | China | Pig | 2019 | Unknown | MN172368 |
| ASFV/LT14/1490 | Latvia | Wild boar | 2019 | Unknown | MK628478 |
| Odintsovo_02/14 | Russia | Pig | 2014 | | NC_044948 |
| ASFV CzechRepublic 2017/1 | Czech Republic | Wild boar | 2017 | Unknown | LR722600 |
| ASFV Moldova 2017/1 | Moldova | Pig | 2019 | Unknown | LR722599 |
| RSA_2_2008 | South Africa | Pig | 2008 | Unknown | MN336500 |
| LIV_5_40 | Zambia | Tick | | Unknown | MN318203 |
| ASFV/POL/2015/Podlaskie | Poland | Wild boar | 2015 | Virulent | MH681419 |

[0078] The genome of the attenuated ASFV of the invention may correspond to any ASFV genotype. The genome of the attenuated ASFV of the invention may essentially correspond to any ASFV genotype.

[0079] The term “corresponds to” means that the remainder of the genome of the attenuated ASFV of the invention is the same as a wild-type strain (i.e. a virus that existed at some point in the field). “The remainder of the genome” may refer to all genes other than the genes EP153R and EP402R. “The remainder of the genome” may refer to all genes other than the genes EP153R, EP402R and K145R. In other words, the genes of the attenuated ASFV of the invention may be the same as the genes of the wild-type strain except the genes that are disrupted according to the invention. The genes of the attenuated ASFV of the invention may be the same as the genes of the wild-type strain, except for the genes EP153R and EP402R. The genes of the attenuated ASFV of the invention may be the same as the genes of the wild-type strain, except for the genes EP153R, EP402R and K145R. In an embodiment the genes of the attenuated ASFV of the invention are the same as the genes of the wild-type strain, except for EP153R and EP402R. In an embodiment the genes of the attenuated ASFV of the invention are the same as the genes of the wild-type strain, except for EP153R, EP402R and K145R.

[0080] The disrupted genes may also correspond to the wild-type strain. In an embodiment the genes EP153R and EP402R correspond to the wild-type strain. In such an embodiment (i.e. where EP153R and EP402R correspond to the wild-type strain) expression and/or activity of EP153R and EP402R may be disrupted by one or more mutation in an intergenic region and/or non-coding sequence such as a promoter. In other words, the EP153R and EP402R genes are the same as in the wild-type genome but their expression or activity is altered by mutation of a non-genic sequence. Thus all of the genes of the attenuated ASFV of the invention may be the same as the genes of the wild-type strain. In an embodiment all genes of the attenuated ASFV of the invention are the same as the genes of the wild-type strain. In an embodiment all genes of the attenuated ASFV of the invention are the same as the genes of the wild-type strain, except for the K145R gene.

[0081] The term “essentially corresponds to” means the same as “corresponds to” with the additional exception that the remainder of the genome may comprise one or more mutations. The one or more mutations may be in other genes (i.e. not in the genes EP153R and EP402R, or not in the genes EP153R, EP402R and K145R).

[0082] The genome of the attenuated ASFV may correspond or essentially correspond to genotype I. The genome of the attenuated ASFV may correspond or essentially correspond to genotype II. The genome of the attenuated ASFV may correspond or essentially correspond to genotype III. The genome of the attenuated ASFV may correspond or essentially correspond to genotype IV. The genome of the attenuated ASFV may correspond or essentially correspond to genotype V. The genome of the attenuated ASFV may correspond or essentially correspond to genotype VI. The genome of the attenuated ASFV may correspond or essentially correspond to genotype VII. The genome of the attenuated ASFV may correspond or essentially correspond to genotype VIII. The genome of the attenuated ASFV may correspond or essentially correspond to genotype IX. The genome of the attenuated ASFV may correspond or essentially correspond to genotype X. The genome of the attenuated ASFV may correspond or essentially correspond to genotype XIV.

[0083] The genome of the attenuated ASFV may correspond or essentially correspond to genotype I. The genome of the attenuated ASFV may correspond or essentially correspond to genotype II.

[0084] Preferably, the genome of the attenuated ASFV may correspond or essentially correspond to genotype II.

[0085] The genome of the attenuated ASFV of the invention may correspond or essentially correspond to that of a virulent ASFV strain. Known virulent ASF virus strains include: Georgia 2007/1, Benin 97/1, Kenyan, Malawi Lil20/1, Pretorisuskop/96/4 and Tengani 62. The genome of the attenuated ASFV may correspond or essentially correspond to that of the Benin 97/1 strain.

[0086] The genome of the attenuated ASFV may correspond or essentially correspond to that of the Georgia 2007/1 strain.

[0087] The genome of the attenuated ASFV of the invention may correspond or essentially correspond to that of an ASFV strain whose virulence is currently unknown, for example: Mkuzi, Warmbaths and Warthog.

[0088] In an embodiment the genome of the attenuated ASFV of the invention does not correspond to that of OURT88/3. In an embodiment the genome of the attenuated ASFV of the invention does not correspond to that of NH/P68. In an embodiment the attenuated ASFV of the invention is not OURT88/3. In an embodiment the attenuated ASFV of the invention is not NH/P68. In an embodiment the attenuated ASFV of the invention is neither OURT88/3 nor NH/P68.

### EP402R

[0089] In certain aspects, the invention provides an ASF virus in which expression and/or activity of the EP402R gene has been disrupted.

[0090] In other aspects, the invention provides an EP402R protein comprising particular amino acid changes.

[0091] The EP402R gene encodes a protein which is incorporated in the external layer of the virus and is partly similar to the mammalian T-lymphocyte surface adhesion receptor CD2. In particular, the N-terminal extracellular region of the EP402R protein consists of two immunoglobulin-like (Ig-like) domains similar to the extracellular ligand-binding region of CD2. The EP402R protein may be referred to as CD2v due to this similarity. Accordingly the terms “EP402R” and “CD2v” may be used interchangeably herein. The N-terminal extracellular domain of the EP402R protein may be referred to as the “ligand-binding domain”. The cytoplasmic domain of EP402R protein is dissimilar to CD2.

[0092] EP402R is immunogenic (i.e. evokes an immune response) (Netherton et al. 2019 Front. Immunol. 10, 1318). EP402R is required for and directly involved in haemadsorption (Sereda et al. 2018 Slov. Vet. Res, 55(3) 141-150) and may have a role in virus entry or spread. Antibodies from ASFV infected pigs that inhibit haemadsorption can correlate with protection induced against diverse strains supporting a role for antibodies against EP402R in protection of pigs (Malogolovkin et al. 2015 J. Gen. Virol. 96(4) 866-873, Burmakina et al. 2016 J. Gen. Virol. 97(7) 1670-1675). EP402R can bind the host protein AP-1. The functions of EP402R may be mediated by its extracellular, N-terminal, Ig-like domain binding to ligands in the same manner that mammalian CD2 binds extracellular adhesion molecules.

### EP402R Gene Sequences

[0093] The gene (i.e. nucleotide) sequences and positions in the genome of EP402R genes from different ASFV strains are presented below.

Georgia 2007/1 EP402R
(NC_044959.1: 73369-74451)
SEQ ID No. 229
ATGATAATACTTATTTTTTTAATATTTTCTAACATAGTTTTAAGT
ATTGATTATTGGGTTAGTTTTAATAAAACAATAATTTTAGATAGT
AATATTACTAATGATAATAATGATATAAATGGAGTATCATGGAAT
TTTTTTAATAATTCTTTTAATACACTAGCTACATGTGGAAAAGCA
GGTAACTTTTGTGAATGTTCTAATTATAGTACATCAATATATAAT
ATAACAAATAATTGTAGCTTAACTATTTTTCCTCATAATGATGTA
TTTGATACAACATATCAAGTAGTATGGAATCAAATAATTAATTAT
ACAATAAAATTATTAACACCTGCTACTCCCCCAAATATCACATAT
AATTGTACTAATTTTTTAATAACATGTAAAAAAAATAATGGAACA
AACACTAATATATATTTAAATATAAATGATACTTTTGTTAAATAT
ACTAATGAAAGTATACTTGAATATAACTGGAATAATAGTAACATT
AACAATTTTACAGCTACATGTATAATTAATAATACAATTAGTACA
TCTAATGAAACAACACTTATAAATTGTACTTATTTAACATTGTCA
TCTAACTATTTTTATACTTTTTTTAAATTATATTATATTCCATTA
AGCATCATAATTGGGATAACAATAAGTATTCTTCTTATATCCATC
ATAACTTTTTTATCTTTACGAAAAAGAAAAAAACATGTTGAAGAA
ATAGAAAGTCCACCACCTGAATCTAATGAAGAAGAACAATGTCAG
CATGATGACACCACTTCCATACATGAACCATCTCCCAGAGAACCA
TTACTTCCTAAGCCTTACAGTCGTTATCAGTATAATACACCTATT
TACTACATGCGTCCCTCAACACAACCACTCAACCCATTTCCCTTA
CCTAAACCGTGTCCTCCACCCAAACCATGTCCGCCACCCAAACCA
TGTCCTCCACCTAAACCATGTCCTTCAGCTGAATCCTATTCTCCA
CCCAAACCACTACCTAGTATCCCGCTACTACCCAATATCCCGCCA
TTATCTACCCAAAATATTTCGCTTATTCACGTAGATAGAATTATT
TAA
China/2018/AnhuiXCGQ EP402R
(MK128995.1: 73383-74465)
SEQ ID No. 230
ATGATAATACTTATTTTTTTAATATTTTCTAACATAGTTTTAAGT
ATTGATTATTGGGTTAGTTTTAATAAAACAATAATTTTAGATAGT
AATATTACTAATGATAATAATGATATAAATGGAGTATCATGGAAT
TTTTTTAATAATTCTTTTAATACACTAGCTACATGTGGAAAAGCA
GGTAACTTTTGTGAATGTTCTAATTATAGTACATCAATATATAAT
ATAACAAATAATTGTAGCTTAACTATTTTTCCTCATAATGATGTA
TTTGATACAACATATCAAGTAGTATGGAATCAAATAATTAATTAT
ACAATAAAATTATTAACACCTGCTACTCCCCCAAATATCACATAT
AATTGTACTAATTTTTTAATAACATGTAAAAAAAATAATGGAACA
AACACTAATATATATTTAAATATAAATGATACTTTTGTTAAATAT
ACTAATGAAAGTATACTTGAATATAACTGGAATAATAGTAACATT
AACAATTTTACAGCTACATGTATAATTAATAATACAATTAGTACA
TCTAATGAAACAACACTTATAAATTGTACTTATTTAACATTGTCA
TCTAACTATTTTTATACTTTTTTTAAATTATATTATATTCCATTA
AGCATCATAATTGGGATAACAATAAGTATTCTTCTTATATCCATC
ATAACTTTTTTATCTTTACGAAAAAGAAAAAAACATGTTGAAGAA
ATAGAAAGTCCACCACCTGAATCTAATGAAGAAGAACAATGTCAG
CATGATGACACCACTTCCATACATGAACCATCTCCCAGAGAACCA
TTACTTCCTAAGCCTTACAGTCGTTATCAGTATAATACACCTATT
TACTACATGCGTCCCTCAACACAACCACTCAACCCATTTCCCTTA
CCTAAACCGTGTCCTCCACCCAAACCATGTCCGCCACCCAAACCA
TGTCCTCCACCTAAACCATGTCCTTCAGCTGAATCCTATTCTCCA
CCCAAACCACTACCTAGTATCCCGCTACTACCCAATATCCCGCCA
TTATCTACCCAAAATATTTCGCTTATTCACGTAGATAGAATTATT
TAA
Warthog EP402R (AY261365.1: 73281-74450)
SEQ ID No. 231
ATGATAATAATCCTTATTTTTTTAATATATTTAAAACTGGTCTTA
AATAATAATATTATTATATGGCATCCTACTTTAAATGAAACAATT
TTTTTAAATGTTACAACTATAGGGAATATTAGTGGTCTATTTTGG
AATACATATTATAATAATAATCGTAGTGAACTTACTAAGTGCGGA
ATATATAATAATTATTGTTCATGTGATAGTCTTAATACATCATTG
TATAATATAAATAATTGTAGTTTAGTTATTTTTCCAAATAATACA
AAAATATTTAATACAATATATGAATTAATATATTCAGGTAATCAA
ACTAATTATACAATAAAATTGCTAGAATCTACTACTCCTCCAAAT
ATTACATATAATTGTACTACATCTGTAATAACATGTAAAAAAAAT
AATGGGACAAATACTAATATATTTTTAACTATAAATAATACGATT
GTTAATTCTACTAATGAAGATGTTATTTACTACTATTGGAATAGA
AGTGAATTTAATAACTTTACAGCTACATGTATGATTAATAATACA
ATTAATTCATCAAATATATCAGAAATTATAGACTGTACTAATACA
TTATTATTAAACAGTTATTTAGACTTTTTTCAAGTAGCCGGTTAT
ATGTTTTATATGATAATTTTTATTGTAACTGGAATAACAGTAAGT
ATTTTTATTTCAATCATAACTTTTTTATCTTTACGAAAAAGAAAA
AAACATGTTGAAGAAATAGAAAGTCTACCACCTGAATCTAATGAA
GAAGAATGTCAGCATGATGATGACACCACTTCCATACATGAACCA
TCCCCCAGAGAACCATTACTTCCTAAACCTTACAGTCGTTATCAG
TATAATACACCTATTTACTACATGCGTCCCTCAACACAACCACTC
AACCCATTTCCCCTACCTAAACCATGCCCACCACCTAAACCGTGT
CCGCCACCCAAACCATGTCCTCCACCCAAACCATGCCCGCCACCC
AAACCATGCCCGCCACCTAAACCATGTCCTCCACCTGAATCATGT
TCTTCACCTGAATCATGTTCTTCACCTGAATCATATTCTCCACCC
AAACCACTACCTAGTATCCCGCTGCTACCCAATATCCCGCCATTA
TCTACACAAAATATTTCGCTTATTCATGTAGATAGAATTATTTAA
Pretorisuskop/96/4 EP402R
(AY261363.1: 74089-75309)
SEQ ID No. 232
ATGATAATGTTCATAACACTTATTTTTTTAAGTTATATTAATATA
GTTTTAAGTAATAATTATTGGGCTAGACTTAACGAAACAATAACT
TTAAATAGTAACATTACTAATGATACTAATAATGAATTAGGTATA
TTTTGGAATTCTTATAATAATACTTATTATAATAATACATTTAAT
AATATTGCTATATGTGGAAAAAAAGGTATTTTTTGTGAATGTAAT
ATTAATTATAATACATCTATATCTAATACATCTATATCTAATACA
TCAATATATAATGTAACAAATAATTGTAGTTTAACGATTTTTCTT
TATGATGATAATATATTTAAAACATATCAATTAGTATATCAGAAT
TACAAAATTAATTATACAATAAACTTATTATTACCTGTTACTTCT
CCAAATATTACATATAATTGTACTAACTCTTTAATAACATGTGAA
AAAAATGATGGGACAAACACTAATATGTTTTTATCTATAAATAAT
ATAACCATTAATCATACTAATCAAGATATTCTTACTTACTATTGG
AATAATAGTGAGTTTAATAATTTTACAGCTACATGTATGATTAAT
AATACACTTAATTCAGCAAATACCACAAAAGTTATCAATTGCACT
AATCCATTATTAAATTCTTACCAAAATTATTTTCTTGAAAATATT
CATACATTATTTTATATCATAATTTTTATTGTGAGTGGATTAATA
GCAAGTATTTTTATTTCAATTATAACTTTTTTATCTTTACGAAAA
AGAAAAAAACATGTTGAAGAAATAGAAAGTCCACCACCTGAATCT
AATGAAGAAGAACAATGTCAGCATGATGACACCACTTCCATACAT
GAACCATCTCCCAGAGAACCATTACTTCCTAAACCTTACAGTCGT
TATCAATATAATACACCTATTTACTACATGCGTCCCTCAACACAA
CCACTCAACCCATTTCCCCTACCTAACCCATGTCCTCCACCTAAA
CCGTGTCCTCCACCCAAACCATGCCCGCCACCTAAACCATGTCCC
CCACCCAAACCATGCCCGCCACCTAAACCGTGTCCTCCACCCAAA
CCATGTCCACCACCTAAACCATGTTCTTCACCTGAATCATATTCT
CCACCCAAACCACTACCTAGTATCCCGCTACTACCCAATATCCCA
CCATTATCTACACAAAATATTTCACTTATTCATGTAGATAGAATT
ATTTAA
L60 EP402R (NC_044941.1: 67916-69037)
SEQ ID No. 233
ATGATAATAATAGTTATTTTTTTAATGTGTTTAAAAATAGTTTTA
AACAATATTATAATATGGAGTACTTTAAATCAAACTGTATTTTTA
AATAATATTTTTACAATTAATGATACATATGGTGGTCTATTTTGG
AATACATATTATGATAATAATCGTAGTAATTTTACTTATTGTGGA
ATAGCAGGAAATTATTGTTCATGTTGTGGTCATAACATATCATTG
TATAATACAACAAATAATTGTAGTTTAATTATTTTTCCTAACAAT
ACAGAAATATTTAATAGAACATATGAATTAGTATATTTGGACAAA
AAAATTAATTATACAGTAAAACTATTAAAATCTGTTGATTCCCCA
ACTATTACATATAATTGTACTAATTCTTTAATAACATGTAAAAAT
AATAATGGGACAAATGTTAATATATATTTAATTATTAATAATACA
ATTAGTTCATTGAATGAAACAGAAAATATAAATTGTACTAATCCA
ATATTAAAATATCAAAATTATTTATCCACATTATTTTATATCATA
ATTTTTATTGTGAGTGGATTAATAATAGGTATTTTTATTTCAATC
ATATCTGTATTATCTATACGAAGAAAAAGAAAAAAACATGTTGAA
GAAATAGAAAGTCCACCACCCTCTGAATCTAATGAAGAAGATATT
TCTCACGATGACACCACTTCCATACATGAACCATCTCCCAGAGAA
CCATTACTTCCTAAGCCTTACAGTCGTTATCAGTATAATACACCT
ATTTACTACATGCGTCCCTCAACACAACCACTCAACCCATTTCCC
CTACCTAAACCATGCCCGCCACCTAAACCATGTCCTCCACCCAAG
CCATGCCCGCCACCCAAACCATGTCCTCCACCTAAACCGTGTTCT
CCACCCAAACCGTGTCGTCCACCTAAACCATGTCCTCCACCTAAA
CCATGTCCTCCACCTAAACCATGTCCTCCACCTAAACCATGTCCT
CCATCCAAACCATGTCCTTCACCTGAATCCTATTCTCCACCCAAA
CCACTACCTAGTATCCCGTTACTACCCAATATCCCGCCATTATCT
ACACAAAATATTTCGCTTATTCATGTAGATAGAATTATTTAA
Benin 97/1 EP402R (NC_044956.1: 67567-68775)
SEQ ID No. 234
ATGATAATAATAGTTATTTTTTTAATGTGTTTAAAAATAGTTTTA
AACAATATTATAATATGGAGTACTTTAAATCAAACTGTATTTTTA
AATAATATTTTTACAATTAATGATACATATGGTGGTCTATTTTGG
AATACATATTATGATAATAATCGTAGTAATTTTACTTATTGTGGA
ATAGCAGGAAATTATTGTTCATGTTGTGGTCATAACATATCATTG
TATAATACAACAAATAATTGTAGTTTAATTATTTTTCCTAACAAT
ACAGAAATATTTAATAGAACATATGAATTAGTATATTTGGACAAA
AAAATTAATTATACAGTAAAACTATTAAAATCTGTTGATTCCCCA
ACTATTACATATAATTGTACTAATTCTTTAATAACATGTAAAAAT
AATAATGGGACAAATGTTAATATATATTTAATTATTAACAATACA
ATTGTTAATGATACTAATGGAGATATCCTTAATTATTATTGGAAT
GGTAATAATAATTTTACAGCTACATGTATGATTAATAATACAATT
AGTTCATTGAATGAAACAGAAAATATAAATTGTACTAATCCAATA
TTAAAATATCAAAATTATTTATCCACATTATTTTATATCATAATT
TTTATTGTGAGTGGATTAATAATAGGTATTTTTATTTCAATCATA
TCTGTATTATCTATACGAAGAAAAAGAAAAAAACATGTTGAAGAA
ATAGAAAGTCCACCACCCTCTGAATCTAATGAAGAAGATATTTCT
CACGATGACACCACTTCCATACATGAACCATCTCCCAGAGAACCA
TTACTTCCTAAGCCTTACAGTCGTTATCAGTATAATACACCTATT
TACTACATGCGTCCCTCAACACAACCACTCAACCCATTTCCCCTA
CCTAAACCATGCCCGCCACCTAAACCATGTCCTCCACCCAAGCCA
TGCCCGCCACCCAAACCATGTCCTCCACCTAAACCGTGTTCTCCA
CCCAAACCGTGTCGTCCACCTAAACCATGTCCTCCACCTAAACCA
TGTCCTCCACCTAAACCATGTCCTCCACCTAAACCATGTCCTCCA
TCCAAACCATGTCCTTCACCTGAATCCTATTCTCCACCCAAACCA
CTACCTAGTATCCCGTTACTACCCAATATCCCGCCATTATCTACA
CAAAATATTTCGCTTATTCATGTAGATAGAATTATTTAA
Tengani 62 EP402R (AY261364.1: 68693-69841)
SEQ ID No. 235
ATGATAATAAAGGTTATTTTTTTAGTTTTCTTTAAAATGGTTTTA
AGTAATATTATAATATGGAGTACTTTAAATAACACAATATATTTA
AATATTAATTATTCAGATAGTAATTTATATACTGGTCTATTTTGG
AATAAATATTATAATAATACTCGTAATAATTTTACTACTTGTGTA
ACATCAAATAGTAGCTATTGTACATGTAAAGGCCATAACACATCA
TTGTATAATATAACAAATAATTGTAGTTTAATCATTTTTCCAAAT
AATACAAAAATATTTAATACAACATATGAATTAGTATATTTAAAT
AATAAAATTAATTATACAATACAAATGGTACAACCTGTTGATCCT
CCAATTATTATATATAATGATACTAATAATTCTTTAATAACATGT
GAAAAAAATAATGGAACGAATACTGAAATCTATTTATATTTAAAT
GATACATTTATTAATAATACTAATGAAAATAGTATTAAATACTAT
TGGAATTGTAGCGAATTAAACCATAATATTACAACTACATGTATT
ATTAATAATACACTTAATTCGGCAAATACCACAAAAGTTATAAAT
TGCACTAATCTATTGTTAAAATCTGACCAAAATTATTTTCTTAAA
AATATTCATACATTATTTTATATCATAATTTTTATTGTGGGTGGA
ACATTAATAAGCATTATTATATCAATCATAACTTTTTTATCTTTA
CGAAAAAGAAAAAAACATGTTGAAGAAATAGAAAGTCCACCACCC
TCTGAATCTAATGAAGAAGAACATTGTCAGCATGATGATACCACT
TCCATACATGAACCATCTCCCAGAGAACCATTACTTCCTAAGCCT
TACAGTCGTTATCAGTATAATACACCTATTTACTACATGCGTCCC
TCAACACAACCACTCAACCCATTTCCCCTACCTAAACCATGTCCT
CCACCTAAACCGTGTCCTCCACCCAAACCATGTCCTCCACCTAAA
CCGTGTCCTCCACCTAAACCGTGTCCCCCACCTAAACCATGTCCT
TCACCTGAATCCCATTCTCCACCCAAACCACTACCTAGTATCCCG
CTGCTACCCAATATTCCCCCATTATCTACACAAAATATTTCGCTT
ATTCATGTAGATAGAATTATTTAA
Malawi Lil-20/1 (1983) EP402R
(AY261361.1: 72275-72458)
SEQ ID No. 236
ATGATAATAATACTTATTTTTTTAATAATTCCTAACATAGTTTTA
AGTATTGATTATTGGGTTAGTTTTAATAAAACAATAATTTTAGAT
AGTAATATTACTAATGATAATAATGATATAAATGGAGTATCATGG
AATTTCCTTAATAATTCTCTTAATACACTAGCTACATGTGGAAAA
GCAGGTAACTTTTGTGAATGCTCTAATTATAGTACATCACTATAT
AATATAGCACATAATTGTAGCTTAACTATTTTCCCTCATAATGAT
GTATTTGGTACACCATATCAAGTAGTATGGAATCAAATAATTAAT
TATACAATAAAATTATTAACACCTGTTACTCCCCCAAATATTACA
TATAATTGTACTAATTTTTTAATAACATGTAAAAAAAATAATGGA
ACAAATACTATTATATATTTCAATATAAATGATACTAATGTTAAA
TATACTAATGAAAGTATACTTGAATATAACTGGAATAATAGTAAC
TTTAACAATTTTACAGCTACATGTATAATTAATAATACAATTAAT
TCATCAAATGATACACAAACTATAGACTGCATCAATACATTATTA
AGCAGTTATTTAGACTTTTTTCAAGTAGCCAGTTATATGTTTTAT
ATGATAATTTTTATTGCAACTGGAATAATAGCAAGTATTTTTATA
TCAATCATAACTTTTTTATCTTTACGAAAAAGAAAAAAACATGTT
GAAGAAATAGAAAGTCCATCGCCATCTGAATCTAATGAAGAAGAA
CAATGTCAGCATGATGACACCACTTCCATACATGAACCGTCTCCC
AGAGAACCATTACTTCCTAAGCCTTACAGTCGATATCAGTATAAT
ACACCTATTTACTATATGCGTCCCTTAACACAACCACTCAATCCA
TCTCCCCTACCCAAACTGTGTCCTCCACCCAAACCGTGTCCTCCA
CCCAAACCGTGTCCTCCACCCAAACCGTGTCCTCCACCCAAACCG
TGTCCTTCATCTGAATCATGTTCTCCACCTGAATCATATTCTCTA
CCCAAACCACTACCTAATATCCCGCTACTACCCAATATCCCGCCA
TTATCTACACAAAATATCTCGCTTATTCACGTAGATAGAATTATT
TAA
Ken06.Bus EP402R (NC_044946.1: 69827-70984)
SEQ ID No. 237
ATGATAATAAAGCTTATTTTTTTAATATCATTTAAAATGATTTTA
GGTATTGATTATTGGGTTAGTCTTAATAATACAATAATTTTAGAT
AGTAACATTACTATTAATAATATTACTAATACTACTAATAATCCT
ACATTAAATGGTATATTTTGGAATATTTATAATAATAGTTATAAT
AATACTTTTAATTTACTTACCACATGTGGGAATACATATAATATA
TGTTCTTGTTCTAATAATTATAATACAATATTATTTAATTATAAT
ACCACAAATAATTGTAGTTTAATTATTTCTCCTCATGATGAAAAA
ATTTTTGATACGATGTTTCAGATAATATATTTAACTAATAAAATT
AATTATACAATACGATGGTTACAACCTGTTGATCCCCCAAATATT
TCATTTAATGATAGTAATTCTTTAATAAAATGTGAAAAAAATAAT
GGAACAAATACTGAAATCTATTTATATTTAAATGATACATTTATT
AATAATACTAATGAAAATGATCTTAAATATTATTGGAATTGTAGT
GAGTTAAACTATAATATTACAGCTACATGTATTATTAATAATACA
CTTAATTCGGCAAATACCACAAAAGTTATAAATTGCACTAATCTA
TTATTAAAATCTGACCAAAATTATTTTCTTAAAAACATTCATACA
TTATTTTATATCATAATTTTTATTGTAACTGGGATAATAATAAGT
ATTTTTATAGCAATCATAACTTTTTTATCTTTACGAAAAAGAAAA
AAACATGTTGAAGAAATAGAAAGTCCATCGCCTGAATCTAATGAA
GAGGAAGAACAACAACATCATCATGACACTACTTCCATACATGAA
CCGTCTCCCAGAGAACCATTACTTCCTAAGCCTTACAGTCGTTAT
CAGTATAATACACCTATTTATTACATGCGTCCCTCAACACAACAA
CTATTTAAATCATATTCTTTACCCAAACCATGTCCCCCACCTAAA
CCATGTCCTCCACCTAAACCATGTCCCCCACCCAAACCATGTCCC
TCACCAGAATCATATCCCTCACCTGAACCATATCCTCTACTACCT
AATATCCCACTACCACCCAATATCCCGCCATTATCTACACAAAAT
ATTTCGCTTATTCACGTAGATAGAATTATTTAA
Ken05/Tk1 EP402R (NC_044945.1: 74107-75249)
SEQ ID No. 238
ATGATAATAAAACTTATTTTTTTAATTTGTTTTAAAATAGTTTTA
AGTATTGATAATAAAACAAAATTTAATGAAACATTAATTTTAGAT
AATATTGATTATTGGGTAAAGTTTAATGATACAATAACTTTAGAT
AGTAATATTACTAGTGAAATAGAAGCTGTATCTTGGAATTTTTAT
AATAATACTTTTAATCTACTTGCTACATGTGGAAAAGCAAGTAAC
TTTTGTAGTTGTTCTAATTATAGTACATCATTTTTTAATATTACA
AATAATTGTAGTTTAACTATTTTTTTAATAGACGAGACGTTATTT
AATACAACATATCAAATAGTATATTCAACTAATATAATTAATTAT
AAAATAAACTTATTAATACCTGTTACTCCTCCAATTATTTCATAT
AATTGTACTAATTGTTCTATAAATTGTAAAAAAAGTAATGGTACA
AATACTAATATTTTTTTATCTATAAATGATACAATTGTTACATAT
ACTAATGAAAGTATTCTTAATTATGATTATAACTGTAGTATTTTA
AATAATAATTTTACAGTTACATGTATAATTAATAATACAATTAGT
ACATCAAATACTACAGAATTTATAAACTGCACTAATATATTATTA
AGTAGTTATCTAGATTTTTTTCAAGTAACTAGTTATATATTTTAT
ATGATAATTTTTATTGTAACTGGAATAACAGTAAGTATTCTTATA
TCCATCATAACTTTCTTATTTATACGAAAAAGAAAACATGTTGAA
GAAATAGAAAGTCCACCGCCTGAATCTAATGAAGAAGAACAACAA
TGTCATCATGACACCACTTCTATACATGAACCGTCTCCCAGAGAA
CCATTACTTCCTAAGCCTTACAGTCGTTATCAATATAATACACCT
ATTTACTACATGCGTCCCTCAACACAACAACTATTTAAATCATAT
TCTTTACCCAAACCATGTCCCCCACCTAAACCATGTCCTCCACCC
AAACCATGTCCCCCACCCAAACCATGTCCTCCACCCAAACCATGT
CCTCCATCCAAACCATATCCTTCACTACCTAGTATCCCGCTACCA
CCCGATATCCCGCCATTATCTACACAAAATATTTCGCTTATTCAC
GTAGATAGAATTATTTAA
Kenya 1950 EP402R (AY261360.1: 76800-77978)
SEQ ID No. 239
ATGATAATAAAACTTATTTTTTTAATTTGTTTTAAAATAGTTTTA
AGTATTGATAATAAAACAAAATTTAATGAAACATTAATTTTAGAT
AATATTGATTATTGGGTAAAGTTTAATGATACAATAACTTTAGAT
AGTAATATTACTAGTGAAATAGAAGCTGTATCTTGGAATTTTTAT
AATAATACTTTTAATCTACTTGCTATATGTGGAAAAGCAAGTAAC
TTTTGTAGTTGTTCTAATTATAGTACATCATTTTTTAATATTACA
AATAATTGTAGTTTAACTATTTTTTTAATAGACGAGACGTTATTT
AATACAACATATCAAATAGTATATTCAACTAATATAATTAATTAT
AAAATAAACTTATTAATACCTGTTACTCCTCCAATTATTTCATAT
AATTGTGCTAATTGTTCTATAAATTGTAAAAAAAGTAATGGTACA
AATACTAATATTTTTTTATCTATAAATGATACAATTGTTACATAT
ACTAATGAAAGTATTCTTAATTATGATTATAACTGTAGTATTTTA
AATAATAATTTTACAGTTACATGTATAATTAATAATACAATTAGC
ACATCAAATACTACAGAATTTATAAACTGCACTAATATATTATTA
AGTAGTTATCTAGATTTTTTTCAAGTAACTAGTTATATATTTTAT
ATGATAATTTTTATTGTAACTGGAATAACAGTAAGTATTCTTATA
TCCATCATAACTTTCTTATTTATACGAAAAAGAAAACATGTTGAA
GAAATAGAAAGTCCACCGCCTGAATCTAATGAAGAAGAACAACAA
TGTCATCATGACACCACTTCTATACATGAACCGTCTCCCAGAGAA
CCATTACTTCCTAAGCCTTACAGTCGTTATCAATATAATACACCT
ATTTACTACATGCGTCCCTCAACACAACAACTATTTAAATCATAT
TCTTTACCCAAACCATGTCCCCCACCTAAACCATGTCCTCCACCT
AAACCATGTCCCCCACCTAAACCATGTCCTCCATCCAAACCATGT
CCTCCACCTGAACCATATTCTCCACCCAAACCATGTCCTCCACCC
AAACCATATCCTTCACTACCTAGTATCCCGCTACCACCCGATATC
CCGCCATTATCTACACAAAATATTTCGCTTATTCACGTAGATAGA
ATTATTTAA
Warthog EP402R (AY261366.1: 70011-71156)
SEQ ID No. 240
ATGATAATTAAACTTATTTTTTTAATTTGTTTCAAAATAGTTTTA
AGTATTAATTATTGGGTTAGGTATAATGATACAGTAACTTTAAAT
AGTAATATCAATAGCGAGACAGAAGGTATATTTTGGAATTTTTAT
AATAATACTTTTAATACTATTGCCACATGTGGAAAAAAAAATAAT
GTTTGTGAATGTTCTAATTATGATAAATCCTTATATAATATAACA
AATAATTGTAGTTTAACAATTTTTCCAAATAATACAAAAATATTT
AATACAACATATCAATTAGTATATTCACGCAATAGAATTAATTAC
ACAATAAATTTGTTATTACCTGTTACATCTCCAATTATTACATAT
AATTGTACTCAATCTTTAATAACATGTGAAAAAACTAATGGAACA
AATATTCATTTATTCTTAAATTTAAATGATACAATTAATGAATAT
ACTAACAAAAGTTTTCTCAATTACTATTGGAATAGTAGTGAGTTA
AATAATATTTTTCTTGCTACATGTATTATTAATAATACACTTAAT
TCAGCAAATACTACAAAAGTTATCAATTGCACTAACCCATTATTA
AAATCTTACCAAAATTATTTTCTTGAAAATATTCATACATTATTT
TATATGATAATTTTTATTGTATCTGGAATAACAATAAGTATTTTT
ATATCAATCATAACTTTTTTATCTTTACGAAAAAGAAAAAAACAT
GTTGAAGAAATAGAGAGTCCACCACCTGAATCTAATGAAGAAGAA
CAATGTCAGCATGATGACACCACTTCTATACATGAACCATCTCCC
AGAGAACCATTACTTCCTAAACCTTACAGTCGTTATCAGTATAAT
ACACCTATTTACTACATGCGTCCCTCAACACAACCACTCAACCCA
TTTCCCCTACCTAAACCATGCCCGCCACCTAAACCGTGTCCTCCA
CCCAAACCATGCCCGCCACCCAAACCATGCCCGCCACCTAAACCA
TGTCCTCCACCCAAACCATGCCCGCCACCTAAACCATGTCCTCCA
CCTGAATCATATTCTCCACCCAAACCACTACCTAGTATCCCGCTG
CTACCCAATATCCCGCCATTATCTACACAAAATATTTCGCTTATT
CATGTAGATAGAATTATTTAA
Mkuzi 1979 EP402R (AY261362.1: 75106-76287)
SEQ ID No. 241
ATGATGATAATTATACTTATTTTTTTAATATGTTTAAAAATAGTT
TTAAATAATAATATTATAATATGGCATACTTTAAATGAAACAATT
TTTTTAAATAATAGTATTACATTTACGGATAATCTTGGTGGTCTA
TTTTGGAATACATATTATAATAATAATCATAGTATCCTTACTAGT
TGCGGAATATATCAAAATTATTGTTCATGCACTAATAATTATAGC
ACATCATTATATAATATAACAAATAATTGTGGTTTAATAATTTTT
CCAAATAATACAAAAAGATTTAACACAACGTATGAATTAGTATAT
TTAAATAATAGTACTAAATATACAATAAACTTATTAGTACCTGTT
ACTCCTCCAAATATTACATATAATTGTACTACATCTGTAATAACA
TGTAAAAAAAATGATGGCACAAATACTAATATGTTTTTAAAAATA
AATGATACAATCGTTAAAAGTAGTAATGAAAGTGTTTTTGAATAC
TCTTGGAATAGTACTGATTTAAATAACAATTTTACGGCTATATGT
ATAATTAATAATACAATTAATTCATCAAATGACACACAAACTATA
GAATGTCCCAATATATTATTAAACAATTATTTAGACTTTTTTCAA
GTAACTAGTTACATGTTTTATATGATAATTTTTATTGTAACTGGA
ATAATAGCAAGTATTTTTATTTCAATCATAACTTTTTTATCTTTA
CGAAAAAGAAAAAAACATGTTGAAGAAATAGAAAGTCCACCACCC
TCTGAATCTAATGAAGAAGATATTTCTCACGATGACACCACTTCC
ATACATGAACCATCTCCCAGAGAACCATTACTTCCTAAGCCTTAC
AGTCGTTATCAGTATAATACACCTATTTACTACATGCGTCCCTCA
ACACAACCACTCAACCCATTTCCCCTACCTAAACCATGCCCGCCA
CCTAAACCATGCCCGCCACCCAAACCATGTCCTCCACCTAAACCG
TGTCCTCCACCCAAACCGTGTCGTCCACCTAAACCATGTCCTCCA
CCTAAACCATGCCCACCACCTAAACCATGTCCTTCACCTGAAACA
TATTCTCCACCCAAACCACTACCTAATATCCCGCTGCTACCCAAT
ATCCCGCCATTATCTACACAAAATATTTCGCTTATTCACGTAGAT
AGGATTATTTAA

[0094] In an embodiment the invention provides an ASF virus in which the expression and/or activity of the EP402R gene is disrupted. Suitably, the EP402R gene comprises the sequence of SEQ ID No. 229, 230, 231, 232, 233, 234, 235, 236, 237, 238, 239, 240 or 241. Suitably, the EP402R gene comprises a sequence having at least 70%, at least 80%, at least 90% or at least 95% identity with SEQ ID No. 229, 230, 231, 232, 233, 234, 235, 236, 237, 238, 239, 240 or 241. Suitably, the EP402R gene consists of the sequence of SEQ ID No. 229, 230, 231, 232, 233, 234, 235, 236, 237, 238, 239, 240 or 241.

[0095] In an embodiment of the ASFV of the invention the EP402R gene may be partially or completely deleted. Suitably part or all of the sequence of SEQ ID No. 229, 230, 231, 232, 233, 234, 235, 236, 237, 238, 239, 240 or 241 is removed from the ASFV genome. Suitably the ASFV genome lacks any of these sequences.

### EP402R Protein Sequences

[0096] The amino acid sequences of EP402R proteins from different ASFV strains are presented below as SEQ ID Nos 21 to 30 and SEQ ID Nos 242 to 246.

Benin 97/1 EP402R protein
SEQ ID No. 21
MIIIVIFLMCLKIVLNNIIIWSTLNQTVFLNNIFTINDTYGGLFW
NTYYDNNRSNFTYCGIAGNYCSCCGHNISLYNTTNNCSLIIFPNN
TEIFNRTYELVYLDKKINYTVKLLKSVDSPTITYNCTNSLITCKN
NNGTNVNIYLIINNTIVNDINGDILNYYWNGNNNFTATCMINNTI
SSLNETENINCTNPILKYQNYLSTLFYIIIFIVSGLIIGIFISII
SVLSIRRKRKKHVEEIESPPPSESNEEDISHDDTTSIHEPSPREP
LLPKPYSRYQYNTPIYYMRPSTQPLNPFPLPKPCPPPKPCPPPKP
CPPPKPCPPPKPCSPPKPCRPPKPCPPPKPCPPPKPCPPPKPCPP
SKPCPSPESYSPPKPLPSIPLLPNIPPLSTQNISLIHVDRII
Mkuzi EP402R protein
SEQ ID No. 22
MIIILIFLICLKIVLNNNIIIWHTLNETIFLNNSITFTDNLGGLF
WNTYYNNNHSILTSCGIYQNYCSCINNYSTSLYNITNNCGLIIFP
NNTKRFNTTYELVYLNNSTKYTINLLVPVTPPNITYNCTTSVITC
KKNDGTNTNMFLKINDTIVKSSNESVFEYSWNSTDLNNNFTAICI
INNTINSSNDTQTIECPNILLNNYLDFFQVTSYMFYMIIFIVTGI
IASIFISIITFLSLRKRKKHVEEIESPPPSESNEEDISHDDTTSI
HEPSPREPLLPKPYSRYQYNTPIYYMRPSTQPLNPFPLPKPCPPP
KPCPPPKPCPPPKPCPPPKPCRPPKPCPPPKPCPPPKPCPSPETY
SPPKPLPNIPLLPNIPPLSTQNISLIHVDRII
Warmbaths EP402R protein
SEQ ID No. 23
MIIILIFLIYLKLVLNNNIIIWHPTLNETIFLNVTTIGNISGLFW
NTYYNNNRSELTKCGIYNNYCSCDSLNTSLYNINNCSLVIFPNNT
KIFNTIYELIYSGNQTNYTIKLLESTTPPNITYNCTTSVITCKKN
NGTNTNIFLTINNTIVNSTNEDVIYYYWNRSEFNNFTATCMINNT
INSSNISEIIDCTNTLLLNSYLDFFQVAGYMFYMIIFIVTGITVS
IFISIITFLSLRKRKKHVEEIESLPPESNEEECQHDDDTTSIHEP
SPREPLLPKPYSRYQYNTPIYYMRPSTQPLNPFPLPKPCPPPKPC
PPPKPCPPPKPCPPPKPCPPPKPCPPPESCSSPESCSSPESYSPP
KPLPSIPLLPNIPPLSTQNISLIHVDRII
Georgia 2007/1 EP402R protein
SEQ ID No. 24
MIILIFLIFSNIVLSIDYWVSFNKTIILDSNITNDNNDINGVSWN
FENNSENTLATCGKAGNFCECSNYSTSIYNITNNCSLTIFPHNDV
FDTTYQVVWNQIINYTIKLLTPATPPNITYNCTNFLITCKKNNGT
NTNIYLNINDTFVKYTNESILEYNWNNSNINNFTATCIINNTIST
SNETTLINCTYLTLSSNYFYTFFKLYYIPLSIIIGITISILLISI
ITFLSLRKRKKHVEEIESPPPESNEEEQCQHDDTTSIHEPSPREP
LLPKPYSRYQYNTPIYYMRPSTQPLNPFPLPKPCPPPKPCPPPKP
CPPPKPCPSAESYSPPKPLPSIPLLPNIPPLSTQNISLIHVDRII
Malawi Lil-20/1 (1983) EP402R protein
SEQ ID No. 25
MIIILIFLIIPNIVLSIDYWVSENKTIILDSNITNDNNDINGVSW
NFLNNSLNTLATCGKAGNFCECSNYSTSLYNIAHNCSLTIFPHND
VFGTPYQVVWNQIINYTIKLLTPVTPPNITYNCTNFLITCKKNNG
TNTIIYENINDTNVKYTNESILEYNWNNSNFNNFTATCIINNTIN
SSNDTQTIDCINTLLSSYLDFFQVASYMFYMIIFIATGIIASIFI
SIITFLSLRKRKKHVEEIESPSPSESNEEEQCQHDDTTSIHEPSP
REPLLPKPYSRYQYNTPIYYMRPLTQPLNPSPLPKLCPPPKPCPP
PKPCPPPKPCPPPKPCPSSESCSPPESYSLPKPLPNIPLLPNIPP
LSTQNISLIHVDRII
Kenya 1950 EP402R protein
SEQ ID No. 26
MIIKLIFLICFKIVLSIDNKTKFNETLILDNIDYWVKENDTITLD
SNITSEIEAVSWNFYNNTENLLAICGKASNFCSCSNYSTSFFNIT
NNCSLTIFLIDETLENTTYQIVYSTNIINYKINLLIPVTPPIISY
NCANCSINCKKSNGTNTNIFLSINDTIVTYTNESILNYDYNCSIL
NNNFTVTCIINNTISTSNTTEFINCTNILLSSYLDFFQVTSYIFY
MIIFIVTGITVSILISIITFLFIRKRKHVEEIESPPPESNEEEQQ
CHHDTTSIHEPSPREPLLPKPYSRYQYNTPIYYMRPSTQQLFKSY
SLPKPCPPPKPCPPPKPCPPPKPCPPSKPCPPPEPYSPPKPCPPP
KPYPSLPSIPLPPDIPPLSTQNISLIHVDRII
N10 EP402R protein
SEQ ID No. 27
MIIKLIFLISFKMILGIDYWVSLNNTIILDSNITINNITNTTNNP
TLNGIFWNIYNNSYNNTENLLTTCGNTYNICSCSNNYNTILFNYN
TTNNCSLIISPHDEKIFDTMFQIIYLTNKINYTIRWLQPVDPPNI
SENDSNSLIKCEKNNGTNTEIYLYLNDTFINNTNENDLKYYWNCS
ELNYNITATCIINNTLNSANTTKVINCTNLLLKSDQNYFLKNIHT
LFYIIIFIVTGIIISIFIAIITFLSLRKRKKHVEEIESPSPESNE
EEEQQHHHDTTSIHEPSPREPLLPKPYSRYQYNTPIYYMRPSTQQ
LFKSYSLPKPCPPPKPCPPPKPCPPPKPCPSPESYPSPEPYPLLP
NIPLPPNIPPLSTQNISLIHVDRII
Tengani 62 EP402R protein
SEQ ID No. 28
MIIKVIFLVFFKMVLSNIIIWSTLNNTIYLNINYSDSNLYTGLFW
NKYYNNTRNNFTTCVTSNSSYCTCKGHNTSLYNITNNCSLIIFPN
NTKIFNTTYELVYLNNKINYTIQMVQPVDPPIIIYNDTNNSLITC
EKNNGTNTEIYLYLNDTFINNTNENSIKYYWNCSELNHNITTTCI
INNTLNSANTTKVINCTNLLLKSDQNYFLKNIHTLFYIIIFIVGG
TLISIIISIITFLSLRKRKKHVEEIESPPPSESNEEEHCQHDDTT
SIHEPSPREPLLPKPYSRYQYNTPIYYMRPSTQPLNPFPLPKPCP
PPKPCPPPKPCPPPKPCPPPKPCPPPKPCPSPESHSPPKPLPSIP
LLPNIPPLSTQNISLIHVDRII
Pr4 EP402R protein
SEQ ID No. 29
MFITLIFLSYINIVLSNNYWARLNETITLNSNITNDTNNELGIFW
NSYNNTYYNNTENNIAICGKKGIFCECNINYNTSISNTSISNTSI
YNVTNNCSLTIFLYDDNIFKTYQLVYQNYKINYTINLLLPVTSPN
ITYNCTNSLITCEKNDGTNTNMFLSINNITINHTNQDILTYYWNN
SEFNNFTATCMINNTLNSANTTKVINCTNPLLNSYQNYFLENIHT
LFYIIIFIVSGLIASIFISIITFLSLRKRKKHVEEIESPPPESNE
EEQCQHDDTTSIHEPSPREPLLPKPYSRYQYNTPIYYMRPSTQPL
NPFPLPNPCPPPKPCPPPKPCPPPKPCPPPKPCPPPKPCPPPKPC
PPPKPCSSPESYSPPKPLPSIPLLPNIPPLSTQNISLIHVDRII
Warthog EP402R protein
SEQ ID No. 30
MIIKLIFLICFKIVLSINYWVRYNDTVTLNSNINSETEGIFWNFY
NNTENTIATCGKKNNVCECSNYDKSLYNITNNCSLTIFPNNTKIF
NTTYQLVYSRNRINYTINLLLPVTSPIITYNCTQSLITCEKTNGT
NIHLFLNLNDTINEYTNKSFLNYYWNSSELNNIFLATCIINNTLN
SANTTKVINCTNPLLKSYQNYFLENIHTLFYMIIFIVSGITISIF
ISIITFLSLRKRKKHVEEIESPPPESNEEEQCQHDDTTSIHEPSP
REPLLPKPYSRYQYNTPIYYMRPSTQPLNPFPLPKPCPPPKPCPP
PKPCPPPKPCPPPKPCPPPKPCPPPKPCPPPESYSPPKPLPSIPL
LPNIPPLSTQNISLIHVDRII
SEQ ID No. 242
China/2018/AnhuiXCGQ EP402R protein
MIILIFLIFSNIVLSIDYWVSENKTIILDSNITNDNNDINGVSWN
FENNSENTLATCGKAGNFCECSNYSTSIYNITNNCSLTIFPHNDV
FDTTYQVVWNQIINYTIKLLTPATPPNITYNCTNFLITCKKNNGT
NTNIYLNINDTFVKYTNESILEYNWNNSNINNFTATCIINNTIST
SNETTLINCTYLTLSSNYFYTFFKLYYIPLSIIIGITISILLISI
ITFLSLRKRKKHVEEIESPPPESNEEEQCQHDDTTSIHEPSPREP
LLPKPYSRYQYNTPIYYMRPSTQPLNPFPLPKPCPPPKPCPPPKP
CPPPKPCPSAESYSPPKPLPSIPLLPNIPPLSTQNISLIHVDRII
Pretorisuskop/96/4 EP402R protein
SEQ ID No. 243
MIMFITLIFLSYINIVLSNNYWARLNETITLNSNITNDTNNELGI
FWNSYNNTYYNNTENNIAICGKKGIFCECNINYNTSISNTSISNT
SIYNVTNNCSLTIFLYDDNIFKTYQLVYQNYKINYTINLLLPVTS
PNITYNCTNSLITCEKNDGTNTNMFLSINNITINHTNQDILTYYW
NNSEFNNFTATCMINNTLNSANTTKVINCTNPLLNSYQNYFLENI
HTLFYIIIFIVSGLIASIFISIITFLSLRKRKKHVEEIESPPPES
NEEEQCQHDDTTSIHEPSPREPLLPKPYSRYQYNTPIYYMRPSTQ
PLNPFPLPNPCPPPKPCPPPKPCPPPKPCPPPKPCPPPKPCPPPK
PCPPPKPCSSPESYSPPKPLPSIPLLPNIPPLSTQNISLIHVDRI
I
L60 EP402R protein
SEQ ID No. 244
MIIIVIFLMCLKIVLNNIIIWSTLNQTVFLNNIFTINDTYGGLFW
NTYYDNNRSNFTYCGIAGNYCSCCGHNISLYNTTNNCSLIIFPNN
TEIFNRTYELVYLDKKINYTVKLLKSVDSPTITYNCTNSLITCKN
NNGTNVNIYLIINNTISSLNETENINCTNPILKYQNYLSTLFYII
IFIVSGLIIGIFISIISVLSIRRKRKKHVEEIESPPPSESNEEDI
SHDDTTSIHEPSPREPLLPKPYSRYQYNTPIYYMRPSTQPLNPFP
LPKPCPPPKPCPPPKPCPPPKPCPPPKPCSPPKPCRPPKPCPPPK
PCPPPKPCPPPKPCPPSKPCPSPESYSPPKPLPSIPLLPNIPPLS
TQNISLIHVDRII
Ken06.Bus EP402R protein
SEQ ID No. 245
MIIKLIFLISFKMILGIDYWVSLNNTIILDSNITINNITNTTNNP
TLNGIFWNIYNNSYNNTFNLLTTCGNTYNICSCSNNYNTILFNYN
TTNNCSLIISPHDEKIFDTMFQIIYLTNKINYTIRWLQPVDPPNI
SFNDSNSLIKCEKNNGTNTEIYLYLNDTFINNTNENDLKYYWNCS
ELNYNITATCIINNTLNSANTTKVINCTNLLLKSDQNYFLKNIHT
LFYIIIFIVTGIIISIFIAIITFLSLRKRKKHVEEIESPSPESNE
EEEQQHHHDTTSIHEPSPREPLLPKPYSRYQYNTPIYYMRPSTQQ
LFKSYSLPKPCPPPKPCPPPKPCPPPKPCPSPESYPSPEPYPLLP
NIPLPPNIPPLSTQNISLIHVDRII
Ken05/Tk1 EP402R protein
SEQ ID No. 246
MIIKLIFLICFKIVLSIDNKTKFNETLILDNIDYWVKENDTITLD
SNITSEIEAVSWNFYNNTENLLATCGKASNFCSCSNYSTSFFNIT
NNCSLTIFLIDETLENTTYQIVYSTNIINYKINLLIPVTPPIISY
NCTNCSINCKKSNGTNTNIFLSINDTIVTYTNESILNYDYNCSIL
NNNFTVTCIINNTISTSNTTEFINCTNILLSSYLDFFQVTSYIFY
MIIFIVTGITVSILISIITFLFIRKRKHVEEIESPPPESNEEEQQ
CHHDTTSIHEPSPREPLLPKPYSRYQYNTPIYYMRPSTQQLFKSY
SLPKPCPPPKPCPPPKPCPPPKPCPPPKPCPPSKPYPSLPSIPLP
PDIPPLSTQNISLIHVDRII

[0097] In an embodiment the invention provides an attenuated ASF virus in which the expression and/or activity of the EP402R gene is disrupted. Suitably, the EP402R gene encodes a protein comprising a sequence having at least 70%, 75%, 80%, 85%, 90% or 95% identity with any of SEQ ID Nos 21, 22, 23, 24, 25, 26, 27, 28, 29, 30, 242, 243, 244, 245 or 246. Suitably, the EP402R gene encodes a protein comprising the sequence of any of SEQ ID Nos 21, 22, 23, 24, 25, 26, 27, 28, 29, 30, 242, 243, 244, 245 or 246.

[0098] In an embodiment the ASFV of the invention does not express EP402R protein. In other words, the ASFV of the invention does not express any proteins with sequences of SEQ ID Nos 21, 22, 23, 24, 25, 26, 27, 28, 29, 30, 242, 243, 244, 245 or 246.

### EP402R Mutant Proteins

[0099] In one aspect the invention provides an EP402R protein comprising one or more amino acid changes in the ligand-binding domain wherein the amino acid changes disrupt ligand-binding of the EP402R protein.

[0100] The ligand-binding domain of EP402R is formed by amino acids starting at position 1 (N-terminus) and running to roughly position 200. For example, the ligand-binding domain of Benin 97/1 EP402R is formed by amino acids 1-198 of SEQ ID No. 21 which are presented below as SEQ ID No. 34.

Benin 97/1 EP402R protein
ligand-binding domain
SEQ ID No. 34
MIIIVIFLMCLKIVLNNIIIWSTLNQTVFLNNIFTINDTYGGLFW
NTYYDNNRSNFTYCGIAGNYCSCCGHNISLYNTTNNCSLIIFPNN
TEIFNRTYELVYLDKKINYTVKLLKSVDSPTITYNCTNSLITCKN
NNGTNVNIYLIINNTIVNDINGDILNYYWNGNNNFTATCMINNTI
SSLNETENINCTNPILKY

[0101] The ligand-binding domain of Georgia 2007/1 EP402R is formed by amino acids 1-203 of SEQ ID No. 24 which are presented below as SEQ ID No. 380.

Georgia 2007/1 EP402R protein
ligand-binding domain
SEQ ID No. 380
MIILIFLIFSNIVLSIDYWVSENKTIILDSNITNDNNDINGVSWN
FENNSENTLATCGKAGNFCECSNYSTSIYNITNNCSLTIFPHNDV
FDTTYQVVWNQIINYTIKLLTPATPPNITYNCTNFLITCKKNNGT
NTNIYLNINDTFVKYTNESILEYNWNNSNINNFTATCIINNTIST
SNETTLINCTYLTLSSNYFYTFF

[0102] Suitably, the ligand-binding domain of the EP402R protein comprises the sequence of SEQ ID No. 34 or 380. Suitably, the ligand-binding domain of the EP402R protein comprises a sequence having at least 70%, 80%, 90% or at least 95% identity with SEQ ID No. 34 or 380. The ligand-binding domain of the EP402R protein from other strains can be readily identified by alignment with the sequence of Benin 97/1 EP402R protein and/or Georgia 2007/1 EP402R protein, such as shown in FIG. 3.

[0103] Suitably one or more amino acids (such as two or more, three or more, four or more or five or more amino acids) in the ligand-binding domain of the EP402R protein are changed compared to the wild type EP402R protein. In an embodiment, the one or more amino acids in the ligand-binding domain are deleted (i.e. removed entirely). In an embodiment, the one or more amino acids in the ligand-binding domain are changed to different amino acids (i.e. replaced). Such an amino change may be referred to as a substitution. Changing one or more amino acids in the ligand-binding domain of the EP402R protein may disrupt expression and/or activity of the EP402R protein. In an embodiment, changing one or more amino acids in the ligand-binding domain of the EP402R protein may disrupt haemadsorption mediated by the EP402R protein.

[0104] The amino acid changes in the EP402R protein are caused by one or more mutations in the sequence coding for the EP402R protein. In an embodiment, the one or more mutations may be a deletion or an interruption as described herein. For example, deletion of part of the coding sequence for the ligand-binding domain of the EP402R protein would result in the absence of the encoded amino acids (i.e. changing the amino acids) from the ligand-binding domain, which may disrupt ligand binding.

[0105] In an embodiment, one or more of the mutations may be a point mutation. Suitably one or more of the mutations may be point mutation that changes a single amino acid into a different amino acid. Changing even a single amino acid may disrupt expression and/or activity of the EP402R protein, such as ligand binding activity.

[0106] Changing one or more amino acids may disrupt folding of the EP402R protein. Disruption of folding may mean the EP402R protein cannot fold at all causing it to be degraded by the cellular protein degradation machinery. Alternatively, the disruption of folding may mean the EP402R protein is folded differently, impairing its function, or the EP402R protein may be folded more slowly and so is not correctly expressed (e.g. it is not expressed at the cell surface).

[0107] Changing a charged amino acid to an amino acid with the opposite charge may disrupt folding of the EP402R ligand-domain such that a binding pocket is deformed, which prevents ligand binding due to steric hindrance. Alternatively or additionally, substitution with an amino acid with the opposite charge may prevent electrostatic binding of a ligand. Another possibility is that changing an amino acid with a small side-chain to an amino acid with a bulky side-chain, or vice versa, may disrupt folding of the EP402R ligand-binding domain so that a binding pocket does not form which prevents ligand binding.

[0108] Thus in an embodiment the one or more changed amino acids in the ligand-binding domain may comprise a negatively charged amino acid that is changed to a positively charged amino acid. In an embodiment the one or more changed amino acids in the ligand-binding domain may comprise a positively charged amino acid that is changed to a negatively charged amino acid. Positively charged amino acids (i.e. amino acids that can have a positive charge) include histidine (H), lysine (K) and arginine (R). Negatively charged amino acids (i.e. amino acids that can have a negative charge) include aspartic acid (D) and glutamic acid (E).

[0109] In an embodiment the one or more changed amino acids in the ligand-binding domain may comprise an amino acid with a small side-chain that is changed to an amino acid with a bulky side-chain. In an embodiment the one or more changed amino acids in the ligand-binding domain may comprise an amino acid with a bulky side-chain that is changed to an amino acid with a small side-chain. Amino acids with a bulky side-chain include tryptophan (W). Amino acids with a small side-chain include glycine (G) and alanine (A).

[0110] In an embodiment the one or more changed amino acids in the ligand-binding domain may comprise an amino acid with a hydrophilic side-chain that is changed to an amino acid with a hydrophobic side-chain. In an embodiment the one or more changed amino acids in the ligand-binding domain may comprise an amino acid with a hydrophobic side-chain that is changed to an amino acid with a hydrophilic side-chain. Amino acids with a hydrophobic side-chain include alanine (A), valine (V), isoleucine (I), leucine (L), methionine (M), phenylalanine (F), tyrosine (Y) and tryptophan (W). Amino acids with a hydrophilic side-chain include arginine (R), histidine (H), lysine (K), aspartic acid (D), glutamic acid (E), serine (S), threonine (T), asparagine (N) and glutamine (Q).

[0111] Changing amino acid E99 to R or amino acid Y102 to D disrupts the ability of EP402R protein from Benin 97/1 strain to mediate haemadsorption (see FIG. 2). Furthermore, changing the amino acid Q96 to R disrupts the ability of EP402R protein from Georgia 2007/1 strain to mediate haemadsorption (see FIGS. 4 and 7). Changing the amino acid W99 of Georgia 2007/1 EP402R to D may disrupt the folding of EP402R and thus lead to disrupted expression and/or activity. Accordingly, in an embodiment the EP402R protein of the invention comprises an amino acid change at a position which corresponds to Q96 and/or W99 of the Georgia 2007/1 EP402R protein (SEQ ID No. 24). Q96 of the Georgia 2007/1 EP402R protein corresponds to E99 of the Benin 97/1 EP402R protein, and W99 of the Georgia 2007/1 EP402R protein corresponds to Y102 of the Benin 97/1 EP402R protein. Thus, in an embodiment the EP402R protein of the invention comprises an amino acid change at a position which corresponds to E99 and/or Y102 of the Benin 97/1 EP402R protein (SEQ ID No. 21). In other words, the EP402R protein expressed by the attenuated ASF virus of the invention may be the EP402R protein from any ASF virus strain, and the amino acid that is changed corresponds to Q96 and/or W99 of the amino acid sequence of Georgia 2007/1 EP402R protein, which is presented herein as SEQ ID No. 24. Alternatively expressed, the EP402R protein expressed by the attenuated ASF virus of the invention may be the EP402R protein from any ASF virus strain, and the amino acid that is changed corresponds to E99 and/or Y102 of the amino acid sequence of the EP402R protein from the Benin 97/1 strain, which is presented herein as SEQ ID NO. 21. The positions Q96 and W99 refer to amino acids glutamine and tryptophan at positions 96 and 99 respectively of the Georgia 2007/1 EP402R protein. The positions E99 and Y102 refer to amino acids glutamic acid and tyrosine at positions 99 and 102 respectively of the Benin 97/1 EP402R protein.

[0112] Whether an amino acid corresponds to Q96 and/or W99 of the Georgia 2007/1 EP402R protein (or to E99 and/or Y102 of the Benin 97/1 EP402R protein) may be assessed by sequence alignment. For example, FIG. 3 shows an alignment of EP402R proteins from Benin, Mkuzi, Warmbaths, Tengnani, Warthog, Georgia and Malawi strains. The amino acid in the EP402R protein from each strain that corresponds to Q96 of Georgia 2007/1 EP402R protein and E99 of Benin 97/1 EP402R protein is the amino acid shown below the Benin E99 residue (highlighted in yellow). The amino acid in the EP402R protein from each strain that corresponds to W99 of Georgia 2007/1 EP402R protein and Y102 of Benin 97/1 EP402R protein is the amino acid shown below the Benin Y102 residue (three amino acids to the right of the amino acids highlighted in yellow). The amino acids in the EP402R protein from the strains in FIG. 3 that correspond to Q96 and/or W99 of the Georgia 2007/1 EP402R protein and E99 and Y102 in Benin 97/1 EP402R are given in Table 2 below.

TABLE 2

| | |
|---|---|
| Strain | Corresponding Amino acid |

| | | |
|---|---|---|
| Benin 97/1 | E99 | Y102 |
| Mkuzi | E101 | Y104 |
| Warmbaths | E98 | Y101 |
| Tengani | E100 | Y103 |
| Warthog | Q95 | Y98 |
| Georgia | Q96 | W99 |
| Malawi | Q97 | W100 |

[0113] Amino acids corresponding to Q96 and/or W99 of the Georgia 2007/1 EP402R protein and E99 and Y102 of Benin 97/1 EP402R exist in EP402R proteins from strains other than those shown in FIG. 3 and listed in Table 2 above (such as other strains listed in Table 1 herein). The skilled person can readily determine using sequence alignment which amino acid in an EP402R protein from a given strain, such as a strain from Table 1, corresponds to Q96 and/or W99 of the Georgia 2007/1 EP402R protein and E99 or Y102 of Benin 97/1 EP402R. The corresponding amino acid may be identical to Q96 or W99 of Georgia 2007/1 EP402R or to E99 or Y102 of Benin 97/1 EP402R. For example, an amino acid corresponding to Q96 of Georgia 2007/1 EP402R may also be a Q (glutamine). The corresponding amino acid may be similar to Q96 or W99. Suitably the corresponding amino acid has the same charge as Q96 or W99. Suitably the corresponding amino acid to Q96 is an E (glutamic acid). Suitably the corresponding amino acid to W99 is a Y (tyrosine). The expression “corresponding to Q96 and/or W99 of Georgia 2007/1 EP402R protein” encompasses Q96 and/or W99 of Georgia 2007/1 EP402R protein. The expression “corresponding to E99 and/or Y102 of Benin 97/1 EP402R protein” encompasses E99 and/or Y102 of Benin 97/1 EP402R protein.

[0114] Suitably the amino acid at the position which corresponds to Q96 is changed to R or to an amino acid that is a conservative replacement of R and/or the amino acid at the position which corresponds to W99 is changed to D or to an amino acid that is a conservative replacement of D. An amino acid that is “conservative replacement” has similar characteristics to the other amino acid. For example, the conservative replacement may have similar charge (positive or negative), similar hydrophobicity (hydrophilic or hydrophobic) or similar molecular size, be also aromatic, or have a combination of these characteristics. Suitably the amino acid at the position which corresponds to Q96 is changed to H, K or R and/or the amino acid at the position which corresponds to W99 is changed to D, E, N or Q. Suitably the amino acid at the position which corresponds to Q96 is changed to R and/or the amino acid at the position which corresponds to W99 is changed to D.

[0115] In an embodiment the EP402R protein of the invention comprises an amino acid sequence having at least 70% sequence identity, such as at least 75% identity, such as at least 80% identity, such as at least 85% identity, such as at least 90% identity, such as least 95% identity, such as least 96% identity, such as least 97% identity, such as least 98% identity, such as least 99% identity, with any of SEQ ID Nos 21 to 30 or SEQ ID Nos 242 to 246 (i.e. the sequences of EP402R protein from different ASFV strains as described herein). Suitably the EP402R protein of the invention comprises an amino acid sequence having at least 70%, 75%, 80%, 85%, 90%, 95%, 96%, 97%, 98% or 99% identity with SEQ ID No. 21. Suitably the EP402R protein of the invention comprises an amino acid sequence having at least 70%, 75%, 80%, 85%, 90%, 95%, 96%, 97%, 98% or 99% identity with SEQ ID No. 22. Suitably the EP402R protein of the invention comprises an amino acid sequence having at least 70%, 75%, 80%, 85%, 90%, 95%, 96%, 97%, 98% or 99% identity with SEQ ID No. 23. Suitably the EP402R protein of the invention comprises an amino acid sequence having at least 70%, 75%, 80%, 85%, 90%, 95%, 96%, 97%, 98% or 99% identity with SEQ ID No. 24. Suitably the EP402R protein of the invention comprises an amino acid sequence having at least 70%, 75%, 80%, 85%, 90%, 95%, 96%, 97%, 98% or 99% identity with SEQ ID No. 25. Suitably the EP402R protein of the invention comprises an amino acid sequence having at least 70%, 75%, 80%, 85%, 90%, 95%, 96%, 97%, 98% or 99% identity with SEQ ID No. 26. Suitably the EP402R protein of the invention comprises an amino acid sequence having at least 70%, 75%, 80%, 85%, 90%, 95%, 96%, 97%, 98% or 99% identity with SEQ ID No. 27. Suitably the EP402R protein of the invention comprises an amino acid sequence having at least 70%, 75%, 80%, 85%, 90%, 95%, 96%, 97%, 98% or 99% identity with SEQ ID No. 28. Suitably the EP402R protein of the invention comprises an amino acid sequence having at least 70%, 75%, 80%, 85%, 90%, 95%, 96%, 97%, 98% or 99% identity with SEQ ID No. 29. Suitably the EP402R protein of the invention comprises an amino acid sequence having at least 70%, 75%, 80%, 85%, 90%, 95%, 96%, 97%, 98% or 99% identity with SEQ ID No. 30. Suitably the EP402R protein of the invention comprises an amino acid sequence having at least 70%, 75%, 80%, 85%, 90%, 95%, 96%, 97%, 98% or 99% identity with SEQ ID No. 242. Suitably the EP402R protein of the invention comprises an amino acid sequence having at least 70%, 75%, 80%, 85%, 90%, 95%, 96%, 97%, 98% or 99% identity with SEQ ID No. 243. Suitably the EP402R protein of the invention comprises an amino acid sequence having at least 70%, 75%, 80%, 85%, 90%, 95%, 96%, 97%, 98% or 99% identity with SEQ ID No. 244. Suitably the EP402R protein of the invention comprises an amino acid sequence having at least 70%, 75%, 80%, 85%, 90%, 95%, 96%, 97%, 98% or 99% identity with SEQ ID No. 245. Suitably the EP402R protein of the invention comprises an amino acid sequence having at least 70%, 75%, 80%, 85%, 90%, 95%, 96%, 97%, 98% or 99% identity with SEQ ID No. 246.

[0116] In certain embodiments, the amino acids that differ between the reference sequence (i.e. SEQ ID Nos 21 to 30 or SEQ ID Nos 242 to 246) and the sequence that is less than 100% identical to the reference sequence are conservative replacements.

[0117] The amino acid sequence of the EP402R protein from Benin 97/1 strain comprising the E99R amino acid change is depicted below as SEQ ID No. 31.

Benin 97/1 EP402R E99R protein
SEQ ID No. 31
MIIIVIFLMCLKIVLNNIIIWSTLNQTVFLNNIFTINDTYGGLFW
NTYYDNNRSNFTYCGIAGNYCSCCGHNISLYNTTNNCSLIIFPNN
TEIFNRTYRLVYLDKKINYTVKLLKSVDSPTITYNCTNSLITCKN
NNGTNVNIYLIINNTIVNDINGDILNYYWNGNNNFTATCMINNTI
SSLNETENINCTNPILKYQNYLSTLFYIIIFIVSGLIIGIFISII
SVLSIRRKRKKHVEEIESPPPSESNEEDISHDDTTSIHEPSPREP
LLPKPYSRYQYNTPIYYMRPSTQPLNPFPLPKPCPPPKPCPPPKP
CPPPKPCPPPKPCSPPKPCRPPKPCPPPKPCPPPKPCPPPKPCPP
SKPCPSPESYSPPKPLPSIPLLPNIPPLSTQNISLIHVDRII

[0118] The amino acid sequence of the EP402R protein from Benin 97/1 strain comprising the Y102D substitution is depicted below as SEQ ID No. 32.

Benin 97/1 EP402R Y102D protein
SEQ ID No. 32
MIIIVIFLMCLKIVLNNIIIWSTLNQTVFLNNIFTINDTYGGLFW
NTYYDNNRSNFTYCGIAGNYCSCCGHNISLYNTTNNCSLIIFPNN
TEIFNRTYELVDLDKKINYTVKLLKSVDSPTITYNCTNSLITCKN
NNGTNVNIYLIINNTIVNDINGDILNYYWNGNNNFTATCMINNTI
SSLNETENINCTNPILKYQNYLSTLFYIIIFIVSGLIIGIFISII
SVLSIRRKRKKHVEEIESPPPSESNEEDISHDDTTSIHEPSPREP
LLPKPYSRYQYNTPIYYMRPSTQPLNPFPLPKPCPPPKPCPPPKP
CPPPKPCPPPKPCSPPKPCRPPKPCPPPKPCPPPKPCPPPKPCPP
SKPCPSPESYSPPKPLPSIPLLPNIPPLSTQNISLIHVDRII

[0119] The amino acid sequence of the EP402R protein from Georgia 2007/1 strain comprising the Q96R substitution is depicted below as SEQ ID No. 33.

Georgia 2007/1 EP402R Q96R protein
SEQ ID No. 33
MIILIFLIFSNIVLSIDYWVSENKTIILDSNITNDNNDINGVSWN
FENNSENTLATCGKAGNFCECSNYSTSIYNITNNCSLTIFPHNDV
FDTTYRVVWNQIINYTIKLLTPATPPNITYNCTNFLITCKKNNGT
NTNIYLNINDTFVKYTNESILEYNWNNSNINNFTATCIINNTIST
SNETTLINCTYLTLSSNYFYTFFKLYYIPLSIIIGITISILLISI
ITFLSLRKRKKHVEEIESPPPESNEEEQCQHDDTTSIHEPSPREP
LLPKPYSRYQYNTPIYYMRPSTQPLNPFPLPKPCPPPKPCPPPKP
CPPPKPCPSAESYSPPKPLPSIPLLPNIPPLSTQNISLIHVDRII

[0120] The amino acid sequence of the EP402R protein from Georgia 2007/1 strain comprising the W99D substitution is depicted below as SEQ ID No. 379.

Georgia 2007/1 EP402R W99D protein
SEQ ID No. 379
MIILIFLIFSNIVLSIDYWVSENKTIILDSNITNDNNDINGVSWN
FENNSENTLATCGKAGNFCECSNYSTSIYNITNNCSLTIFPHNDV
FDTTYQVVDNQIINYTIKLLTPATPPNITYNCTNFLITCKKNNGT
NTNIYLNINDTFVKYTNESILEYNWNNSNINNFTATCIINNTIST
SNETTLINCTYLTLSSNYFYTFFKLYYIPLSIIIGITISILLISI
ITFLSLRKRKKHVEEIESPPPESNEEEQCQHDDTTSIHEPSPREP
LLPKPYSRYQYNTPIYYMRPSTQPLNPFPLPKPCPPPKPCPPPKP
CPPPKPCPSAESYSPPKPLPSIPLLPNIPPLSTQNISLIHVDRII

[0121] In an embodiment the EP402R protein of the invention comprises the amino acid sequence of any of SEQ ID Nos 31, 32, 33 or 379. Suitably the EP402R protein of the invention comprises or consists of the amino acid sequence of SEQ ID No. 31 (Benin 97/1 EP402R protein with E99R amino acid change). Suitably the EP402R protein of the invention comprises or consists of the amino acid sequence of SEQ ID No. 32 (Benin 97/1 EP402R protein with Y102D amino acid change). Suitably the EP402R protein of the invention comprises or consists of the amino acid sequence of SEQ ID No. 33 (Georgia 2007/1 EP402R protein with Q96R amino acid change). Suitably the EP402R protein of the invention comprises or consists of the amino acid sequence of SEQ ID No. 379 (Georgia 2007/1 EP402R protein with W99D amino acid change).

[0122] In an embodiment the EP402R protein of the invention comprises one or more amino acid changes at positions in the EP402R protein corresponding to N16, 119, W21, Y76, E99, Y102 and/or N108 of Benin 97/1 EP402R protein (SEQ ID NO. 21). In an embodiment the one or more mutations change the amino acid at position N16, 119, W21, Y76, E99, Y102 and/or N108 of the EP402R protein of the Benin 97/1 strain, or the corresponding position in the EP402R protein of any other ASFV strain. In an embodiment the one or more mutations change an amino acid at a position in the EP402R protein corresponding to S15, W19, Q96, N104, and/or K108D of Georgia 2007/1 EP402R protein (SEQ ID NO. 24). In an embodiment the one or more mutations change the amino acid at position S15, W19, Q96, N104, and/or K108D of the EP402R protein of the Georgia 2007/1 EP402R protein (SEQ ID NO. 24), or the corresponding position in the EP402R protein of any other ASFV strain. In an embodiment the one or more mutations change an amino acid at a position in the EP402R protein corresponding to W20, Q112, N121 and/or R125 of N10 Genotype IX EP402R protein (SEQ ID NO. 27). In an embodiment the one or more mutations change the amino acid at position S15, W19, Q96, N104, and/or K108D of the EP402R protein of the N10 Genotype IX EP402R protein (SEQ ID NO. 27), or the corresponding position in the EP402R protein of any other ASFV strain. These amino acids are in the ligand-binding domain of the EP402R protein and are surface exposed.

[0123] Suitably, the mutation is selected from N16R, 119R, W21D, Y 76D, E99R, Y102D and/or N108R at a position corresponding to the position in the Benin 97/1 EP402R protein (SEQ ID NO. 11). Suitably, the mutation is a combination of E99R and N108R at the positions corresponding to the positions in the Georgia 2007/1 EP402R protein (SEQ ID NO. 11).

[0124] Suitably, the mutation is selected from S15R, W19D, Q96R, N104R and/or K108D at a position corresponding to the position in the Georgia 2007/1 EP402R protein (SEQ ID NO. 24). Suitably, the mutation is a combination of Q96R and N104R at the positions corresponding to the positions in the Georgia 2007/1 EP402R protein (SEQ ID NO. 24).

[0125] Suitably, the mutation is selected from W20D, Q112R, N121R and/or R125D at a position corresponding to the position in the N10 Genotype IX EP402R protein (SEQ ID NO. 27). Suitably, the mutation is a combination of Q112R and N121R at the positions corresponding to the positions in the N10 Genotype IX EP402R protein (SEQ ID NO. 27).

[0126] Suitably, where the attenuated ASFV is genotype I, the one or more mutations change an amino acid at a position in the EP402R protein corresponding to Y76, E99, Y102, and/or N108 of Benin 97/1 EP402R protein (SEQ ID NO. 11). Suitably, where the attenuated ASFV is genotype I, the mutation is selected from Y76D, E99R, Y102D, and/or N108R at a position corresponding to the position in the Benin 97/1 EP402R protein (SEQ ID NO. 11). Suitably, where the attenuated ASFV is genotype II, the one or more mutations change an amino acid at a position in the EP402R protein corresponding to S15, W19, Q96, N104, and/or K108D of Georgia 2007/1 EP402R protein (SEQ ID NO. 24). Suitably, where the attenuated ASFV is genotype II, the mutation is selected from S15R, W19D, Q96R, N104R and/or K108D at a position corresponding to the position in the Georgia 2007/1 EP402R protein (SEQ ID NO. 24). Suitably, where the attenuated ASFV is genotype II, the mutation may be a combination of Q96R and N104R at the positions corresponding to the positions in the Georgia 2007/1 EP402R protein (SEQ ID NO. 24).

[0127] The invention also provides a polynucleotide encoding the EP402R protein of the invention. Suitably the polynucleotide comprises a sequence having at least 70% identity, such as at least 75%, 80%, 85%, 90%, 95%, 96%, 97%, 98% or 99% identity, with any of SEQ ID Nos 229 to 241 (i.e. the coding sequences of the EP402R genes from different strains of ASFV). Suitably the polynucleotide comprises a sequence having at least 70% identity, such as at least 75%, 80%, 85%, 90%, 95%, 96%, 97%, 98% or 99% identity, with SEQ ID No. 229 (i.e. the coding sequences of the Georgia 2007/1 EP402R gene).

[0128] The invention also provides a vector comprising the polynucleotide of the invention. Suitable vectors are known in the art and include plasmids for protein expression in cells such as bacteria, yeast or vertebrate cells, among or other cell types known in the art.

### ASF Virus Comprising Mutated EP402R

[0129] In another aspect the invention provides an ASF virus comprising the EP402R protein of the invention, such as described above. In a similar aspect the invention provides an ASF virus comprising the polynucleotide of the invention, such as described above. In another aspect the invention provides an attenuated ASF virus as described herein, wherein the virus comprises an EP402R gene mutated to express an EP402R protein of the invention, such as the EP402R protein described above.

[0130] The skilled person will appreciate from the present disclosure that an ASF virus can be mutated to express an EP402R protein comprising any of the amino acid changes described herein by appropriately modifying the coding sequence of the EP402R gene using molecular biology techniques known in the art. Thus the invention encompasses ASF viruses comprising any EP402R protein of the invention disclosed herein. Additionally, the skilled person will appreciate from the present disclosure that any EP402R protein described herein may be combined in an ASF virus of the invention with the other modifications to the ASF virus described herein, in particular modification of the K145R and EP153R genes. Furthermore, the ASFV of the invention comprising the EP402R protein with amino acid changes of the invention may be attenuated.

[0131] In an embodiment of the ASF virus of the invention, the EP402R gene comprises one or more mutations that change one or more amino acids in the ligand-binding domain of the EP402R protein. Suitably the EP402R gene comprises one or more mutations (such as two or more, three or more, four or more or five or more mutations) that change one or more amino acids (such as two or more, three or more, four or more or five or more amino acids) in the ligand-binding domain of the EP402R protein.

[0132] In embodiments of the ASF virus of the invention, the ASF virus comprises one or more mutations in the EP402R gene that change one or more amino acids in the EP402R protein in any of the ways described herein. For example, in an embodiment the one or more mutations in the EP402R gene change the amino acid at position Q96 and/or W99 of the EP402R protein of the Georgia 2007/1 strain, or the corresponding position in the EP402R protein of any other ASFV strain. In an embodiment the one or more mutations in the EP402R gene change the amino acid at position Q96 of the EP402R protein of the Georgia 2007/1 strain (SEQ ID No. 24) to R.

### Activity of EP402R

[0133] In an embodiment of the ASFV of the invention, EP402R activity is disrupted.

[0134] In an embodiment the activity of EP402R that is disrupted is its ability to mediate haemadsorption. In other words, the ability of EP402R to mediate haemadsorption may be decreased. The ability of EP402R to mediate haemadsorption may be decreased by at least 50, 60, 70, 80 or 90%. The ability of EP402R to mediate haemadsorption may be completely abolished.

[0135] The activity of EP402R that is disrupted may be the ability of the EP402R protein to bind ligands via its extracellular N-terminal Ig-like domain (i.e. its ligand-binding domain). Thus in an embodiment the invention provides an ASF virus wherein the EP402R gene comprises one or more mutations that disrupt ligand binding by the EP402R protein. The ability of the EP402R protein to bind one or more ligands may be disrupted. The ability of EP402R to bind one or more ligands may be decreased by at least 50, 60, 70, 80 or 90%. The ability of the EP402R protein to bind one or more ligands may be completely abolished. The ability of the EP402R protein to bind one or more ligands may be completely abolished whilst retaining the ability to bind other ligands. In an embodiment, the invention provides an attenuated ASF virus wherein the EP402R gene comprises one or more mutations that disrupt ligand binding by the EP402R protein. Ligand binding may be measured using assays such as immunoprecipitation, surface plasmon resonance and/or isothermal calorimetry.

[0136] In an embodiment the invention provides an ASF virus wherein the changed amino acids in the EP402R protein directly inhibit the interaction between EP402R and its ligand by changing the binding surface on EP402R, as described herein.

[0137] In an embodiment the invention provides an ASF virus wherein surface expression of the EP402R protein is reduced compared to a corresponding ASF virus in which the expression and/or activity of the EP402R gene is not disrupted. “Surface expression” of EP402R refers to expression of the EP402R protein on the surface of cells infected with ASF virus. Surface expression of EP402R may be measured by techniques known in the art, such as antibody staining of infected cells (see for example FIG. 8 and Example 3).

### EP153R

[0138] In certain aspects, the invention provides an ASF virus in which expression and/or activity of the EP153R gene has been disrupted.

[0139] The EP153R gene is expressed both early and late in infection. EP153R may also be referred to as 8CR. The EP153R protein is a C-type lectin. C-type animal lectins are found in serum, the extracellular matrix and cell membranes and are thought to act as receptors for carbohydrate ligands. The EP153R protein comprises a C-type lectin domain, a cell attachment sequence (RGD) and a transmembrane domain, and has similarity with CD44 molecules involved in T cell activation.

[0140] The gene (i.e. nucleotide) sequences and positions in the genome of EP153R genes from different ASFV strains are presented below.

Benin 97/1 EP153R (NC_044956.1: 67030-67491)
SEQ ID No. 204
ATGTATTTTAAGAAAAAATACATCGGTCTTATTGATAAGAACTGT
GAAAAAAAAATATTAGATGATTCTAGTACAATAAAAATTTGTTAC
ATATTAATTGGAATATTGATTGGAACTAATATGATAACTCTTATT
TATAATTTCATATTCTGGGATAATTATATAAAATGTTACCGAAAT
AATGATAAAATGTTTTACTGTCCTAATGATTGGGTTGGATATAAT
AATATTTGTTACTATTTTAGTAATGGTAGTTTTTCTAAAAATTAT
ACAGCTGCTAGTAATTTTTGTAGACAATTAAATGGTACACTTGCT
AATAATGATACTAATTTATTAAATCTAACTAAAATATATAATAAT
CAATCTATGTATTGGGTTAACAATACGGTAATATTACGTGGTGAT
AATAAATATAGTCAAAAAGTTAACTATACAGATTTATTATTTATT
TGTGGTAAATAA
Georgia 2007/1 EP153R (NC_044959.1: 73369-74451)
SEQ ID No. 205
ATGTTTTCTAACAAAAAGTACATCGGTCTTATCAATAAGAAGGAG
GGTTTGAAAAAAAAAATAGATGATTATAGTATATTAATAATTGGA
ATATTAATTGGAACTAACATCTTAAGCCTTATTATAAATATAATA
GGAGAGATTAATAAACCAATATGTTACCAAAATGATGATAAGATA
TTTTATTGCCCTAAAGATTGGGTTGGATATAATAATGTTTGTTAT
TATTTTGGCAATGAAGAAAAAAATTATAATAATGCAAGTAATTAT
TGTAAGCAATTAAATAGTACGCTTACTAATAATAATACTATTTTA
GTAAATCTTACTAAAACATTAAATCTTACTAAAACATATAATCAC
GAATCTAATTATTGGGTTAATTATTCTTTAATTAAAAATGAGTCA
GTACTATTACGTGATAGTGGATATTACAAAAAACAAAAACATGTA
AGTTTATTATATATTTGTAGTAAATAA
Ken05/Tk1 EP153R (NC_044945.1: 73544-74038)
SEQ ID No. 206
ATGTATTCTAAGAAAAAGTACATCGGTCTTATTGACAAGAACTGT
GAAAAAAAAATATTAGATGATGCTACTACAATAAAAATTTGTTAC
ATATTAATTGGAATATTGATTGGAACTAATATTATAACTCTTATC
TATAATTTCATATTTTGGGAGAATTATATAAAATGTATCCAAAAT
GATGATAAGATGTTTTACTGTCCTAAAGATTGGGTTGGGTATAAT
AATGCGTGTTATTATTTTAGTAATAACAATAAAAATTATACAGAT
GCAAATAATTATTGTAAAAATTCACATAATAGTACACTTGCTAAT
AATGATACTAAATTATTAAATCTTACTAAATTATTAAATCTTTCT
AAATTATATTACAATGATTCTACATATTGGGTTAAATATTCTTTA
CCTAAAAATAAAGCAGTAACATTACGTAACAGTACCTACAAATAT
GATAGAGTTAAATCTACAGAAACATTTTTTATTTGTAGTAACTAA
Ken06.Bus EP153R (NC_044946.1: 69244-69741)
SEQ ID No. 207
ATGTATTCTAAGAAAAAGTACATCGGTCTTATTGACAAAAGCTGT
GAAAAAAAAATATTAGATGATCCTACTACAATAAAAATTTGTTAC
ATATTAATTGGAATATTGATTGGAACTAATATTATAACTCTTATC
TATAATTTCATATTTTGGGAGAATTATATAAAATGTATCCGAAAT
GATGATAAGATGTTTTACTGCCCTAAAGATTGGGTTGGATATAAT
AATGTGTGTTATTATTTTAGTAACGATAATGGAAAAAATTATATG
AATGCAAGTAATTTTTGTAATAAAAAAAATAGCACGCTTGCTAAT
AATACGACTAATTTAGTAAATCTTACTAAAATATTAAATTTTACC
AAACAATATAATCATGAATCACTTTATTGGGTTAATTATTCTTTA
AGTAATAATATGTCATTAGCATTACAGAATAGTAATTTTCCTTCT
TCAGGAAGACGTAAATATATGGACTTATTATATATATGTAGTATA
TAA
L60 EP153R (NC_044941.1: 67379-67840)
SEQ ID No. 208
ATGTATTTTAAGAAAAAATACATCGGTCTTATTGATAAGAACTGT
GAAAAAAAAATATTAGATGATTCTAGTACAATAAAAATTTGTTAC
ATATTAATTGGAATATTGATTGGAACTAATATGATAACTCTTATT
TATAATTTCATATTCTGGGATAATTATATAAAATGTTACCGAAAT
AATGATAAAATGTTTTACTGTCCTAATGATTGGGTTGGATATAAT
AATATTTGTTACTATTTTAGTAATGGTAGTTTTTCTAAAAATTAT
ACAGCTGCTAGTAATTTTTGTAGACAATTAAATGGTACACTTGCT
AATAATGATACTAATTTATTAAATCTAACTAAAATATATAATAAT
CAATCTATGTATTGGGTTAACAATACGGTAATATTACGTGGTGAT
AATAAATATAGTCAAAAAGTTAACTATACAGATTTATTATTTATT
TGTGGTAAATAA
China/2018/AnhuiXCGQ EP153R
(MK128995.1: 72837-73313)
SEQ ID No. 209
ATGTTTTCTAACAAAAAGTACATCGGTCTTATCAATAAGAAGGAG
GGTTTGAAAAAAAAAATAGATGATTATAGTATATTAATAATTGGA
ATATTAATTGGAACTAACATCTTAAGCCTTATTATAAATATAATA
GGAGAGATTAATAAACCAATATGTTACCAAAATGATGATAAGATA
TTTTATTGCCCTAAAGATTGGGTTGGATATAATAATGTTTGTTAT
TATTTTGGCAATGAAGAAAAAAATTATAATAATGCAAGTAATTAT
TGTAAGCAATTAAATAGTACGCTTACTAATAATAATACTATTTTA
GTAAATCTTACTAAAACATTAAATCTTACTAAAACATATAATCAC
GAATCTAATTATTGGGTTAATTATTCTTTAATTAAAAATGAGTCA
GTACTATTACGTGATAGTGGATATTACAAAAAACAAAAACATGTA
AGTTTATTATATATTTGTAGTAAATAA
Malawi Lil-20/1 (1983) EP153R
(AY261361.1: 70776-71261)
SEQ ID No. 210
ATGTTTTCTAACAAAAAGTACATCGGTCTTATTGACAAGTACTGT
GAAAAAAAAATATTAGATGATTCTAGTACAATAAAAATTTGTTAC
ATATTAATTGGAATACTGATTGGAACTAATATGATAACTCTTATT
TATAATTTCATATTTTGGGAGAATTATATAACATGTAACCAAAAA
GATAAGACGTTTTACTGTCCTAAAGATTGGGTTGGATATAATAAT
GTTTGTTATTATTTTGGCAATGATGAAAAAAATTATAATAATGCA
AGTAATTATTGTAAGCAATTAAATAGTACGCTTACTAATAATAAT
ACTAATTTAGTAAATCTTACTAAAACATTAAATCTTACTAAAACA
TATAATCACGAATCTAATTATTGGGTTAATTATTCTTTAATTAAA
AATGAGTCAGTACTATTACGCAATAGTGGATATTATAAAAAACAA
AAACATGTAAGTTTATTATATATTTGTAGTAAATAA
Warthog EP153R (AY261366. 1: 69453-69944)
SEQ ID No. 211
ATGTTTTCTAATAAAAAGTACATTGGTCTTATCAATAAGAAGGAG
GGATTGAAAAAAAAAATAGATGATTATAGTATATTAATAATTGGA
ATATTAATTGGAACTAACATCTTAAGCCTTATTATAAATATAATA
GGAGAGATTAATAAACCAATATGTTACCAAAATAATGATAAGATA
TTTTATTGCCCTAAAGATTGGGTTGGATATAATAATGTTTGTTAT
TATTTTAGTAATGATAATGGCAATAATTATACAACTGCGGATAAT
AAATGTAAACAATTAAATAATAGTACACTGGCTAATAATCTTACT
GATTTATTAAATCTTACGAGTTTCTTAAATCTTACTAAATTATAT
CATCATCATTCTCATTATTGGGTTAATTATTCTTTAAATAATAAT
TATTCAGTACCATTAATTGATAGTAAATATAATTTAAATAGGAAA
AAAAGTCACTATACAGATTTACTATTTATTTGCAGCAAATAA
Mkuzi 1979 EP153R (AY261362.1: 74549-75013)
SEQ ID No. 212
ATGTATTTTAAGAAAAAATACATCGGTCTTATTGATAAGAACTGT
GAAAAAAAAATATTAGATGATTCTAGTACAATAAAAATTTGTTAC
ATATTAATTGGAATATTGATTGGAACTAATATGATAACTCTTATT
TATAATTTCATATTCTGGGATAATTATATAAAATGTTACCGAAAT
AATGATAAAATGTTTTACTGTCCTAATGATTGGGTTGGATATAAT
AATGTTTGTTACTATTTTAGTAATGGTAGTTTTTTTAAAAATTAT
ACAGATGCTAATAATTATTGTAAAAAAATAAATAGTACTCTTGCT
AATAATGATACTAATTTATTAAGTTTAACTAAAATATACAATAAT
CAATCTATGTATTGGGTTAACAATACAGTAGCATTACGTGGTGAT
AGTGTATATGCACAAAGAAAAGTTAATAATTCAGATCTATTATTT
ATTTGTAGTAAATAA
Warmbaths EP153R (AY261365.1: 72727-73191)
SEQ ID No. 213
ATGTATTTTAAGAAAAAGTACATCGGTCTTATTGATAAGAACTGT
GAAAAAAAAATATTAGATGATTGTACTACAATAAAAATTTGTTAC
ATATTAATTGGAATATTGATTGGAACTAATATGATAACTCTTATT
TATAATTTCATATTTTGGGATCATTATATGACATGTAACAAAAAA
GATAAGATGTTTTACTGTCCTAAAGATTGGGTTGGATATAATAAT
GTTTGTTATTATTTTAGTAATGATAGTTTTACTAAGAATTATACA
TATGCAAGTAATTCTTGTAAAAAAATAAATAGTACACTTGCTAAT
AATGATACTAATTTACTAAATCTTATTAAAGTATATAATAATGTA
TCTGAGTATTGGGTTAATAATACAGTAACATTACGTGGTGATCAT
AAATACATAAATAAGCAAAATAATTGTAATACAGAATTTTTATTT
ATTTGTAGTAGATAG
Tengani 62 EP153R (AY261364.1: 68134-68604)
SEQ ID No. 214
ATGTTTTCTAACAAAAAGTATCCGAGTCTTATCGAAAAAAAAATG
GATGACTTGATGACTTTAAAGTTTTGTTACATCATTATTGCAATC
TTGATCATGACTAATATTTTTAGCCTTGTTGTGAATATATGGGGG
GGGGGTGATCGACAATCTTATGAGAATGTATTTTATTGTCCTAAA
GATTGGGTTGGATATAATAATGCATGTTATTATTTTAGTAATGAT
ATGAAAAATTATACAGAAGCAAGTAATTATTGTAAAAATTTATAT
AATAGTACAATTGTTAATAATAATACTAATATAGTAAATCTTACT
AAAACATTAAATCTTACTAAAATATATAATCATGAAAGTAATTAT
TGGGTTAATTATTCTTTAATTAATAATGAGTCATTAACATTACGG
GACAGTAATTTTCCTTCTTCAGGAAAACGTACATATATAGATTTA
TTATATATATGTAGTATATAA
Pretorisuskop/96/4 EP153R
(AY261363.1: 73562-74029)
SEQ ID No. 215
ATGTATTTTAAGAAAAAGTACATCGGTCTTATTGATAAGAACTGT
GAAAAAAAAATATTAGATGATTGTACTACAATAAAAATTTGTTAC
ATATTAATTGGAATATTGATTGGAACTAATATGATAACTCTTATT
TATAATTTCATATTTTGGGATCATTATATGACATGTAACAAAAAA
GATAAGATGTTTTACTGTCCTAAAGATTGGGTTGGATATAATAAT
GTTTGTTATTATTTTAATAATGATAGTAAGAATTATACAACTGCT
ACTAATTCTTGTAAACAATTAAATAGTACACTTGCTAATAATGAT
ACTAATTTATTAAATCTTACTAAAGTATATCACCATGATAAATTA
TATTGGGTTAACTATTCTTTAAATGACAATTTTTCATTATCATTA
CGTAATAGTACATATGAAAAAAGATCTAAATATTTGCCATTATTA
TTTATTTGCAGTAAATAA
Kenya 1950 EP153R (AY261360.1: 76255-76731)
SEQ ID No. 216
ATGTTTTTGAACAAAAAGTATCCGAGTCTTATCGAAAAAAAAATG
GATGATTTGATGACTTTAAAGTTTTGTTACTTAATAATCACATTT
TTAATCATAACCAATATTTTTAGCCTTGCTATAAATATATGGGGG
GGGGGTGATATGATAGATCGACAAAGTTGTGAAAATATATTTTAC
TGTCCTAAAGATTGGGTTGGCTATAATAATGCGTGTTATTATTTT
AGTAATAACAATAAAAATTATACAGATGCAAATAATTATTGTAAA
AATTCACATAATAGTACACTTGCTAATAATGATACTAAATTATTA
AATCTTACTAAATTATTAAATCTTTCTAAATTATATTACAATGAT
TCTACATATTGGGTTAAATATTCTTTACCTAAAAATAAAGCAGTA
ACATTACGTAACAGTACCTACAAATATGATAGAGTTAAATATACA
GAAACATTTTTTATTTGTAGTAACTAA

[0141] In an embodiment the invention provides an ASF virus in which the expression and/or activity of the EP153R gene is disrupted. Suitably, the EP153R gene comprises the sequence of SEQ ID No. 204, 205, 206, 207, 208, 209, 210, 211, 212, 213, 214, 215 or 216. Suitably, the EP153R gene comprises a sequence having at least 70%, at least 80%, at least 90% or at least 95% identity with SEQ ID No. 204, 205, 206, 207, 208, 209, 210, 211, 212, 213, 214, 215 or 216. Suitably, the EP153R gene consists of the sequence of SEQ ID No. 204, 205, 206, 207, 208, 209, 210, 211, 212, 213, 214, 215 or 216.

[0142] In an embodiment of the ASFV of the invention the EP153R gene may be partially or completely deleted. Suitably part or all of the sequence of SEQ ID No. 204, 205, 206, 207, 208, 209, 210, 211, 212, 213, 214, 215 or 216 is removed from the ASFV genome. Suitably the ASFV genome lacks any of these sequences.

[0143] The accession numbers of EP153R proteins from different strains of ASFV are listed below in Table 3.

TABLE 3

| Strain | EP153R protein accession number |
|---|---|
| BA71V | Q65150 |
| Benin 97/1 | A9L06 |
| E75 | D415P5 |
| Georgia 2007/1 | E0WMJ5 |
| Kenya | P0CA63 |
| Malawi | P0CA64 |
| Portugal/OURT88/1988 | A9JLS3 |
| PretorisuskopPr4/1996 | O89335 |
| Warthog | P0CA65 |

[0144] The amino acid sequences of the EP153R proteins from different ASFV strains are depicted below.

Benin 97/1 EP153R protein
SEQ ID No. 20
MYFKKKYIGLIDKNCEKKILDDSSTIKICYILIGILIGTNMITLI
YNFIFWDNYIKCYRNNDKMFYCPNDWVGYNNICYYFSNGSFSKNY
TAASNFCRQLNGTLANNDTNLLNLTKIYNNQSMYWVNNTVILRGD
NKYSQKVNYTDLLFICGK
Georgia 2007/1 EP153R protein
SEQ ID No. 217
MFSNKKYIGLINKKEGLKKKIDDYSILIIGILIGTNILSLIINII
GEINKPICYQNDDKIFYCPKDWVGYNNVCYYFGNEEKNYNNASNY
CKQLNSTLTNNNTILVNLTKTLNLTKTYNHESNYWVNYSLIKNES
VLLRDSGYYKKQKHVSLLYICSK*
Ken05/Tk1 EP153R protein
SEQ ID No. 218
MYSKKKYIGLIDKNCEKKILDDATTIKICYILIGILIGTNIITLI
YNFIFWENYIKCIQNDDKMFYCPKDWVGYNNACYYFSNNNKNYTD
ANNYCKNSHNSTLANNDTKLLNLTKLLNLSKLYYNDSTYWVKYSL
PKNKAVTLRNSTYKYDRVKSTETFFICSN*
Ken06.Bus EP153R protein
SEQ ID No. 219
MYSKKKYIGLIDKSCEKKILDDPTTIKICYILIGILIGTNIITLI
YNFIFWENYIKCIRNDDKMFYCPKDWVGYNNVCYYFSNDNGKNYM
NASNFCNKKNSTLANNTTNLVNLTKILNFTKQYNHESLYWVNYSL
SNNMSLALQNSNFPSSGRRKYMDLLYICSI*
L60 EP153R protein
SEQ ID No. 220
MYFKKKYIGLIDKNCEKKILDDSSTIKICYILIGILIGTNMITLI
YNFIFWDNYIKCYRNNDKMFYCPNDWVGYNNICYYFSNGSFSKNY
TAASNFCRQLNGTLANNDTNLLNLTKIYNNQSMYWVNNTVILRGD
NKYSQKVNYTDLLFICGK*
China/2018/AnhuiXCGQ EP153R protein
SEQ ID No. 221
MFSNKKYIGLINKKEGLKKKIDDYSILIIGILIGTNILSLIINII
GEINKPICYQNDDKIFYCPKDWVGYNNVCYYFGNEEKNYNNASNY
CKQLNSTLTNNNTILVNLTKTLNLTKTYNHESNYWVNYSLIKNES
VLLRDSGYYKKQKHVSLLYICSK*
Malawi Lil-20/1 (1983) EP153R protein
SEQ ID No. 222
MFSNKKYIGLIDKYCEKKILDDSSTIKICYILIGILIGTNMITLI
YNFIFWENYITCNQKDKTFYCPKDWVGYNNVCYYFGNDEKNYNNA
SNYCKQLNSTLTNNNTNLVNLTKTLNLTKTYNHESNYWVNYSLIK
NESVLLRNSGYYKKQKHVSLLYICSK*
Warthog EP153R protein
SEQ ID No. 223
MFSNKKYIGLINKKEGLKKKIDDYSILIIGILIGTNILSLIINII
GEINKPICYQNNDKIFYCPKDWVGYNNVCYYFSNDNGNNYTTADN
KCKQLNNSTLANNLTDLLNLTSFLNLTKLYHHHSHYWVNYSLNNN
YSVPLIDSKYNLNRKKSHYTDLLFICSK*
Mkuzi 1979 EP153R protein
SEQ ID No. 224
MYFKKKYIGLIDKNCEKKILDDSSTIKICYILIGILIGTNMITLI
YNFIFWDNYIKCYRNNDKMFYCPNDWVGYNNVCYYFSNGSFFKNY
TDANNYCKKINSTLANNDTNLLSLTKIYNNQSMYWVNNTVALRGD
SVYAQRKVNNSDLLFICSK*
Warmbaths EP153R protein
SEQ ID No. 225
MYFKKKYIGLIDKNCEKKILDDCTTIKICYILIGILIGTNMITLI
YNFIFWDHYMTCNKKDKMFYCPKDWVGYNNVCYYFSNDSFTKNYT
YASNSCKKINSTLANNDTNLLNLIKVYNNVSEYWVNNTVTLRGDH
KYINKQNNCNTEFLFICSR*
Tengani 62 EP153R protein
SEQ ID No. 226
MFSNKKYPSLIEKKMDDLMTLKFCYIIIAILIMTNIFSLVVNIWG
GGDRQSYENVFYCPKDWVGYNNACYYFSNDMKNYTEASNYCKNLY
NSTIVNNNTNIVNLTKTLNLTKIYNHESNYWVNYSLINNESLTLR
DSNFPSSGKRTYIDLLYICSI*
Pretorisuskop/96/4 EP153R protein
SEQ ID No. 227
MYFKKKYIGLIDKNCEKKILDDCTTIKICYILIGILIGTNMITLI
YNFIFWDHYMTCNKKDKMFYCPKDWVGYNNVCYYENNDSKNYTTA
TNSCKQLNSTLANNDTNLLNLTKVYHHDKLYWVNYSLNDNFSLSL
RNSTYEKRSKYLPLLFICSK*
Kenya 1950 EP153R protein
SEQ ID No. 228
MFLNKKYPSLIEKKMDDLMTLKFCYLIITFLIITNIFSLAINIWG
GGDMIDRQSCENIFYCPKDWVGYNNACYYFSNNNKNYTDANNYCK
NSHNSTLANNDTKLLNLTKLLNLSKLYYNDSTYWVKYSLPKNKAV
TLRNSTYKYDRVKYTETFFICSN*

[0145] Suitably, the EP153R gene encodes a protein comprising the sequence of SEQ ID No. 20, 217, 218, 219, 220, 221, 222, 223, 224, 225 226, 227 or 228. Suitably, the EP153R gene encodes a protein comprising a sequence having at least 70%, at least 80%, at least 90% or at least 95% identity with SEQ ID No. 20, 217, 218, 219, 220, 221, 222, 223, 224, 225 226, 227 or 228. Suitably, the EP153R gene encodes a protein consisting of the sequence of SEQ ID No. 20, 217, 218, 219, 220, 221, 222, 223, 224, 225 226, 227 or 228.

[0146] In an embodiment the ASFV of the invention does not express EP153R protein. In other words, the ASFV of the invention does not express any proteins with sequences of SEQ ID Nos 20, 217, 218, 219, 220, 221, 222, 223, 224, 225 226, 227 or 228.

[0147] EP153R is immunogenic (i.e. evokes an immune response) (Burmakina et al. 2019 J. Gen. Virol. 100: 259-265). EP153R inhibits capsase-3 activation during ASFV infection and thereby has an inhibitory effect on apoptosis. EP153R is required for haemadsorption. EP153R also inhibits MHC-I expression in infected cells.

### Activity of EP153R

[0148] In an embodiment of the attenuated ASFV of the invention, EP153R activity may be disrupted.

[0149] In an embodiment the activity of EP153R that may be disrupted is its ability to mediate haemadsorption. In other words, the ability of EP153R to mediate haemadsorption may be decreased. The ability of EP153R to mediate haemadsorption may be decreased by at least 50, 60, 70, 80 or 90%. The ability of EP153R to mediate haemadsorption may be completely abolished.

[0150] In an embodiment the activity of EP153R that may be disrupted is its ability to inhibit caspase-3. In other words, the ability of EP153R to inhibit caspase-3 may be decreased. The ability of EP153R to inhibit caspase-3 may be decreased by at least 50, 60, 70, 80 or 90%. The ability of EP153R to inhibit caspase-3 may be completely abolished. Caspase-3 activity may be measured by assays known in the art, such as described by Hurtado et al. (Hurtado et al. 2004 Virology 326: 160-170). For example, the cleaved active caspase-3 fragment of 17 kDa and the inactive procaspase-3 protein of 34 kDa may be quantified using Western blot or mass spectrometry and compared to ascertain the degree of activation of caspase-3. Alternatively or additionally, the ability of caspase-3 in cell extract to cleave a fluorescent substrate may be measured using high performance liquid chromatography.

[0151] In an embodiment the activity of EP153R that may be disrupted is its ability to inhibit MHC-I expression. In other words, the ability of EP153R to inhibit MHC-I expression may be decreased. The ability of EP153R to inhibit MHC-I expression may be decreased by at least 50, 60, 70, 80 or 90%. The ability of EP153R to inhibit MHC-I expression may be completely abolished. MHC-I expression may be measured by assays known in the art, such as described by Hurtado et al. (Hurtado et al. 2011 Arch. Virol. 156(2): 219-234). For example, cell surface expression of MHC-I may be measured using antibody staining of non-permeabilised cells followed by flow cytometry.

### DIVA Mutations

[0152] In an embodiment the ASFV of the invention comprises a Differentiation of Infected from Vaccinated Animals (DIVA) mutation. A DIVA mutation is a mutation in the ASF virus that enables a vaccine comprising the ASF virus to function as a DIVA vaccine (i.e. subjects vaccinated with the DIVA vaccine can be differentiated from subjects infected with a wild-type ASF virus).

[0153] In an embodiment the invention provides an attenuated ASF virus in which the expression and/or activity of the genes EP153R and EP402R is disrupted;

[0154] which comprises a functional version of one or more of the following genes:
[0155] multigene family (MGF) 110 3L, 6L, 7L, 8L, 10L, 11L and 12L,
[0156] MGF 360 5L, 6L, 7L, 10L, 11L, 12L, 13L, 14L, 20R, 21R and 22R, and MGF 505 1R, 2R and 6R;
[0157] and which comprises a DIVA mutation.

[0158] In an embodiment the invention provides an attenuated ASF virus in which the expression and/or activity of the genes EP153R and EP402R is disrupted;

[0159] and which comprises a functional version of one or more of the following genes:
[0160] multigene family (MGF) 110 11L and 12L,
[0161] MGF 360 6L, 10L, 11L, 12L, 13L, and 14L, and
[0162] MGF 505 1R and 2R;
[0163] and which comprises a DIVA mutation.

[0164] In an embodiment the invention provides an attenuated ASF virus in which the expression and/or activity of the genes EP153R and EP402R is disrupted;

[0165] and which comprises a functional version of one or more of the following genes:
[0166] multigene family (MGF) 110 5L, 6L, 8L and 12L,
[0167] MGF 360 6L, 10L, 11L, 12L, 13L, 14L and 21R, and
[0168] MGF 505 1R and 2R;
[0169] and which comprises a DIVA mutation.

[0170] In an embodiment the invention provides an ASF virus comprising an EP402R protein comprising one or more amino acid change in the ligand-binding domain wherein the amino acid change disrupts ligand-binding of the EP402R protein (i.e. an EP402 protein of the invention) and/or a polynucleotide encoding said EP402R protein, and further comprising a DIVA mutation.

[0171] In an embodiment the DIVA mutation disrupts expression of the K145R gene and/or the B125R gene. Suitably the DIVA mutation disrupts expression of the K145R gene. Suitably the K145R gene is partially deleted. Suitably the K145R gene is completely deleted. Suitably the B125R gene is partially deleted. Suitably the B125R gene is completely deleted.

### K145R

[0172] The K145R gene is a late gene.

[0173] The gene (i.e. nucleotide) sequences of K145R genes from different ASFV strains are given below.

Benin 97/1 K145R (NC_044956.1: 58961-59398)
SEQ ID No. 327
ATGGATCATTATCTTAAAAAATTACAAGATATTTATACGAAGCTC
GAGGGCCATCCCTTTCTTTTTAGCCCGTCGAAAACCAATGAAAAA
GAGTTTATTACTCTGCTAAACCAGGCCTTGGCCTCAACGCAGCTT
TACCGCAGCATACAACAGCTGTTTTTAACGATGTATAAGCTAGAT
CCCATTGGGTTTATTAACTATATTAAAACGAGTAAACAAGAGTAT
TTATGCCTGTTGATTAATCCTAAACTCGTTACTAAGTTTTTAAAA
ATAACGAGCTTTAAAATTTACATTAATTTCAGACTGAAAACTTTT
TATATAAGTCCTAATAAGTATAATAATTTTTACACTGCTCCCTCT
GAAGAAAAGACTAACCATCTCCTAAAAGAAGAAAAAACTTGGGCA
AAGATTGTTGAAGAAGGAGGAGAAGAATCCTAA
China/2018/AnhuiXCGQ K145R
(MK128995.1: 64748-65185)
SEQ ID No. 328
ATGGATCATTATCTTAAAAAATTACAAGATATTTATACGAAGCTC
GAGGGTCATCCCTTTCTTTTTAGCCCGTCGAAAACCAATGAAAAA
GAGTTTATTACTCTGCTAAACCAGGCCTTGGCCTCAACGCAGCTT
TACCGCAGCATACAACAGCTGTTTTTAACGATGTATAAGCTAGAT
CCCATTGGGTTTATTAACTATATTAAAACGAGTAAACAAGAGTAT
TTATGCCTGTTAATTAATCCTAAACTCGTTACTAAGTTTTTAAAA
ATAACGAGCTTTAAAATTTACATTAATTTCAGGCTGAAAACTTTT
TATATAAGTCCTAATAAGTATAATAATTTTTACACCGCTCCCTCT
GAAGAAAAGACTAACCATCTTCTAAAAGAAGAAAAAACTTGGGCA
AAGATTGTTGAAGAAGGAGGAGAAGAATCCTAA
Georgia 2007/1 K145R
(NC_044959.1: 64734-65171)
SEQ ID No. 329
ATGGATCATTATCTTAAAAAATTACAAGATATTTATACGAAGCTC
GAGGGTCATCCCTTTCTTTTTAGCCCGTCGAAAACCAATGAAAAA
GAGTTTATTACTCTGCTAAACCAGGCCTTGGCCTCAACGCAGCTT
TACCGCAGCATACAACAGCTGTTTTTAACGATGTATAAGCTAGAT
CCCATTGGGTTTATTAACTATATTAAAACGAGTAAACAAGAGTAT
TTATGCCTGTTAATTAATCCTAAACTCGTTACTAAGTTTTTAAAA
ATAACGAGCTTTAAAATTTACATTAATTTCAGGCTGAAAACTTTT
TATATAAGTCCTAATAAGTATAATAATTTTTACACCGCTCCCTCT
GAAGAAAAGACTAACCATCTTCTAAAAGAAGAAAAAACTTGGGCA
AAGATTGTTGAAGAAGGAGGAGAAGAATCCTAA
Ken05/Tk1 K145R (NC_044945.1: 65442-65879)
SEQ ID No. 330
ATGGATCATTATCTTAAAAAATTACAGGATATTTATAAGAAGCTT
GAGGGTCACCCCTTTCTTTTTAGTCCGTCGAAAACCAATGAAAAA
GAGTTTATTACTCTGCTAAACCAAGCCTTGGCCTCGACGCAGCTT
TACCGCAGCATACAACAGCTGTTTTTAACGATGTATAAGCTAGAT
CCCATTGGGTTTGTTAACTATATTAAAGCGAGTAAACAAGAGTAT
TTATGTCTGTTGATTAATCCTAAACTAGTCACTAAGTTTTTAAAA
ATAACGAGCTTTAAAATTTACATTAATTTTAGGCTGAAAACTTTT
TATATAAGTCCTAATAAGTATAATAATTTTTACATCGCTCCCTCT
GAAGAAAAGGCCAATCATCTCCTAAAAGAAGAAAAAACCTGGGCA
AAGATTGTTGAAGAAGGAGGAGAAGAATCCTAA
Ken06. Bus K145R (NC_044946.1: 61226-61663)
SEQ ID No. 331
ATGGATCATTATCTTAAAAAATTACAGGATATTTATAAGAAGCTT
GAGGGTCACCCCTTTCTTTTTAGTCCGTCGAAAACCAATGAAAAA
GAGTTTATTACTCTGCTAAACCAAGCCTTGGCCTCGACGCAGCTT
TACCGCAGCATACAACAGCTGTTTTTAACGATGTATAAGCTAGAT
CCCATTGGGTTTGTTAACTATATTAAAGCGAGTAAACAAGAGTAT
TTATGTCTGTTGATTAATCCTAAACTAGTCACTAAGTTTTTAAAA
ATAACGAGCTTTAAAATTTACATTAATTTCAGGCTAAAAACTTTC
TATATAAGTCCTAATAAGTATAATAATTTTTACATCGCTCCCTCT
GAAGAAAAGGCCAATCATCTCCTAAAAGAAGAAAAAACCTGGGCA
AAGATTGTTGAAGAAGGAGGAGAAGAATCCTAA
Kenya 1950 K145R (AY261360.1: 68066-68503)
SEQ ID No. 332
ATGGATCATTATCTTAAAAAATTACAGGATATTTATAAGAAGCTT
GAGGGTCACCCCTTTCTTTTTAGTCCGTCGAAAACCAATGAAAAA
GAGTTTATTACTCTGCTAAACCAAGCCTTGGCCTCGACGCAGCTT
TACCGCAGCATACAACAGCTGTTTTTAACGATGTATAAGCTAGAT
CCCATTGGGTTTGTTAACTATATTAAAGCGAGTAAACAAGAGTAT
TTATGTCTGTTGATTAATCCTAAACTAGTCACTAAGTTTTTAAAA
ATAACGAGCTTTAAAATTTACATTAATTTTAGGCTGAAAACTTTT
TATATAAGTCCTAATAAGTATAATAATTTTTACATCGCTCCCTCT
GAAGAAAAGGCCAATCATCTCCTAAAAGAAGAAAAAACCTGGGCA
AAGATTGTTGAAGAAGGAGGAGAAGAATCCTAA
L60 K145R (NC_044941.1: 59310-59747)
SEQ ID No. 333
ATGGATCATTATCTTAAAAAATTACAAGATATTTATACGAAGCTC
GAGGGCCATCCCTTTCTTTTTAGCCCGTCGAAAACCAATGAAAAA
GAGTTTATTACTCTGCTAAACCAGGCCTTGGCCTCAACGCAGCTT
TACCGCAGCATACAACAGCTGTTTTTAACGATGTATAAGCTAGAT
CCCATTGGGTTTATTAACTATATTAAAACGAGTAAACAAGAGTAT
TTATGCCTGTTGATTAATCCTAAACTCGTTACTAAGTTTTTAAAA
ATAACGAGCTTTAAAATTTACATTAATTTCAGACTGAAAACTTTT
TATATAAGTCCTAATAAGTATAATAATTTTTACACTGCTCCCTCT
GAAGAAAAGACTAACCATCTCCTAAAAGAAGAAAAAACTTGGGCA
AAGATTGTTGAAGAAGGAGGAGAAGAATCCTAA
Malawi Lil-20/1 (1983) K145R
(AY261361.1: 62661-63098)
SEQ ID No. 334
ATGGATCATTATCTTAAAAAATTAGAGGATATTTATAAAAAGCTT
GAGGGTCATCCCTTTCTTTTTAGTCCGTCGAAAACCAATGAAAAA
GAGTTTATTACTCTGTTAAACCAAGCCTTGGCCTCAACGCAGCTT
TATCGCAGCATACAACAGCTGTTTTTAACGATGTATAAGCTAGAT
CCCATTGGGTTTATTAACTATATTAAAACGAGTAAACAAGAGTAT
TTATGCCTGTTGATCAATCCTAAACTAGTTACGAAGTTTTTAAAA
ATAACGAGTTTTAAAATTTACATTAATTTCAGGCTGAAAACTTTT
TATATAAGTCCTAATAAATATAATAATTTTTACACCGCTCCCTCT
GAAGAAAAGGCCAATCATCTCCTAAAAGAAGAAAAAACCTGGGCA
AAGATTGTTGAAGAAGGAGGAGAAGAATCCTAA
Mkuzi 1979 K145R (AY261362.1: 66481-66921)
SEQ ID No. 335
ATGGATCATTATCTTAAAAAATTACAAGATATTTATACGAAGCTC
GAGGGCCATCCCTTTCTTTTTAGCCCGTCGAAAACCAATGAAAAA
GAGTTTATTACTCTGCTAAACCAGGCCTTGGCCTCAACGCAGCTT
TACCGCAGCATACAACAGCTGTTTTTAACGATGTATAAGCTAGAT
CCTATAGGGTTTATTAACTATATTAAAACGAGTAAACAAGAGTAT
TTATGCCTGTTGATTAATCCTAAACTCGTTACTAAGTTTTTAAAA
ATAACGAGCTTTAAAATTTACATTAATTTCAGACTGAAAACTTTT
TATATAAGTCCTAATAAGTATAATAATTTTTACACCGCTCCCTCT
GAAGAAAAGACCAACCATCTCCTAAAAGAAGAAAAAACTTGGGCA
AAGATTGTTGAAGAAGGAGGAGGAGAAGAATCCTAA
Pretorisuskop/96/4 K145R
(AY261363.1: 65440-65877)
SEQ ID No. 336
ATGGATCATTATCTTAAAAAATTACAAGAAATTTATACGAAGCTC
GAGGGCCATCCCTTTCTTTTTAGCCCGTCGAAAACCAATGAAAAA
GAGTTTATTACTCTGCTAAACCAGGCCTTGGCCTCAACGCAGCTT
TATCGCAGCATACAACAGCTGTTTTTAACGATGTATAAGCTAGAT
CCCATTGGGTTTATTAACTATATTAAAACGAGTAAACAAGAGTAT
TTATGCCTGTTGATTAATCCTAAACTCGTCACTAAGTTTTTAAAA
ATAACGAGCTTTAAAATTTACATTAATTTCAGACTGAAAACTTTT
TATATAAGTCCTAATAAGTATAATAATTTTTACACCGCTCCCTCT
GAAGAAAAGACCAACCATCTCCTAAAAGAAGAAAAAACTTGGGCA
AAGATTGTTGAAGAAGGAGGAGAAGAATCCTAA
Tengani 62 K145R (AY261364.1: 60111-60548)
SEQ ID No. 337
ATGGATCATTATCTTAAAAAATTACAAGATATTTATACGAAGCTC
GAGGGTCATCCCTTTCTTTTTAGCCCGTCGAAAACCAATGAAAAA
GAGTTTATTACTCTGCTAAACCAGGCCTTGGCCTCAACGCAGCTT
TACCGCAGCATACAACAGCTGTTTTTAACGATGTATAAGCTAGAT
CCCATTGGGTTTATTAACTATATTAAAACGAGTAAACAAGAGTAT
TTATGCCTGTTGATTAATCCTAAACTCGTTACTAAGTTTTTAAAA
ATAACGAGCTTTAAAATTTACATTAATTTCAGACTGAAAACTTTT
TATATAAGTCCTAATAAGTATAATAATTTTTACACCGCTCCCTCT
GAAGAAAAGACTAACCATCTCCTAAAAGAAGAAAAAACTTGGGCA
AAGATTGTTGAAGAAGGAGGAGAAGAATCCTAA
Warmbaths K145R (AY261365.1: 64642-65082)
SEQ ID No. 338
ATGGATCATTATCTTAAAAAATTACAAGATATTTATACGAAGCTC
GAGGGCCATCCCTTTCTTTTTAGCCCGTCGAAAACCAATGAAAAA
GAGTTTATTACTCTGCTAAACCAGGCCTTGGCCTCAACGCAGCTT
TACCGCAGCATACAACAGCTGTTTTTAACGATGTATAAGCTAGAT
CCTATAGGGTTTATTAACTATATTAAAACGAGTAAACAAGAGTAT
TTATGCCTGTTGATTAATCCTAAACTCGTTACTAAGTTTTTAAAA
ATAACGAGCTTTAAAATTTACATTAATTTCAGACTGAAAACTTTT
TATATAAGTCCTAATAAGTATAATAATTTTTACACCGCTCCCTCT
GAAGAAAAGACCAACCATCTCCTAAAAGAAGAAAAAACTTGGGCA
AAGATTGTTGAAGAAGGAGGAGGAGAAGAATCCTAA
Warthog K145R (AY261366.1: 61399-61836)
SEQ ID No. 339
ATGGATCATTATCTTAAAAAATTACAAGATATTTATACGAAGCTC
GAGGGCCATCCCTTTCTTTTTAGCCCGTCGAAAACCAATGAAAAA
GAGTTTATTACTCTGCTAAACCAGGCCTTGGCCTCAACGCAGCTT
TACCGCAGCATACAACAGCTGTTTTTAACGATGTATAAGCTAGAT
CCCATTGGGTTTATTAACTATATTAAAACGAGTAAACAAGAGTAT
TTATGCCTGTTGATTAATCCTAAACTCGTCACTAAGTTTTTAAAA
ATAACGAGCTTTAAAATTTACATTAATTTCAGACTGAAAACTTTT
TATATAAGTCCTAATAAGTATAATAATTTTTACACCGCTCCCTCT
GAAGAAAAGACCAACCATCTCCTAAAAGAAGAAAAAACTTGGGCA
AAGATTGTTGAAGAAGGAGGAGAAGAATCCTAA

[0174] In an embodiment an ASFV of the invention comprises a DIVA mutation that disrupts expression of the K145R gene. In other words, the ASFV lacks a functional version of the K145R gene. Suitably the K145R gene comprises the sequence of SEQ ID No. 327, 328, 329, 330, 331, 332, 333, 334, 335, 336, 337, 338 or 339. Suitably the K145R gene comprises a sequence having at least 70%, at least 80%, at least 90% or at least 95% identity with SEQ ID No. 327, 328, 329, 330, 331, 332, 333, 334, 335, 336, 337, 338 or 339. Suitably the K145R gene consists of the sequence of SEQ ID No. 327, 328, 329, 330, 331, 332, 333, 334, 335, 336, 337, 338 or 339.

[0175] In an embodiment of the ASFV of the invention the K145R gene may be partially or completely deleted. Suitably part or all of the sequence of SEQ ID No. 327, 328, 329, 330, 331, 332, 333, 334, 335, 336, 337, 338 or 339 is removed from the ASFV genome. Suitably the ASFV genome lacks any of these sequences.

[0176] The accessions numbers of K145R proteins from different strains of ASFV are listed below in Table 4.

TABLE 4

| Strain | K145R protein accession number |
|---|---|
| BA71V | Q07385 |
| PretoriuskopPr4/1996 | P0CA50 |
| Warthog | P0CA51 |
| Malawi-Lil/20 | P0CA49 |
| Kenya 1950 | P0CA48 |
| Georgia 2007/1 | E0WM19 |
| Portugal/OURT88/1988 | A9JLR1 |
| E75 | D4I5N9 |
| Benin 97/1 | A9JKZ8 |

[0177] The amino acid sequence of K145R proteins from different ASFV strain are depicted below.

Benin 97/1 K145R protein
SEQ ID No. 340
MDHYLKKLQDIYTKLEGHPFLFSPSKTNEKEFITLLNQALASTQL
YRSIQQLFLTMYKLDPIGFINYIKTSKQEYLCLLINPKLVTKFLK
ITSFKIYINFRLKTFYISPNKYNNFYTAPSEEKTNHLLKEEKTWA
KIVEEGGEES*
China/2018/AnhuiXCGQ protein
SEQ ID No. 341
MDHYLKKLQDIYTKLEGHPFLFSPSKTNEKEFITLLNQALASTQL
YRSIQQLFLTMYKLDPIGFINYIKTSKQEYLCLLINPKLVTKFLK
ITSFKIYINFRLKTFYISPNKYNNFYTAPSEEKTNHLLKEEKTWA
KIVEEGGEES*
Georgia 2007/1 K145R protein
SEQ ID No. 342
MDHYLKKLQDIYTKLEGHPFLFSPSKTNEKEFITLLNQALASTQL
YRSIQQLFLTMYKLDPIGFINYIKTSKQEYLCLLINPKLVTKFLK
ITSFKIYINFRLKTFYISPNKYNNFYTAPSEEKTNHLLKEEKTWA
KIVEEGGEES
Ken05/Tk1 K145R protein
SEQ ID No. 343
MDHYLKKLQDIYKKLEGHPFLFSPSKTNEKEFITLLNQALASTQL
YRSIQQLFLTMYKLDPIGFVNYIKASKQEYLCLLINPKLVTKFLK
ITSFKIYINFRLKTFYISPNKYNNFYIAPSEEKANHLLKEEKTWA
KIVEEGGEES*
Ken06. Bus K145R protein
SEQ ID No. 344
MDHYLKKLQDIYKKLEGHPFLFSPSKTNEKEFITLLNQALASTQL
YRSIQQLFLTMYKLDPIGFVNYIKASKQEYLCLLINPKLVTKFLK
ITSFKIYINFRLKTFYISPNKYNNFYIAPSEEKANHLLKEEKTWA
KIVEEGGEES*
Kenya 1950 K145R protein
SEQ ID No. 345
MDHYLKKLQDIYKKLEGHPFLFSPSKTNEKEFITLLNQALASTQL
YRSIQQLFLTMYKLDPIGFVNYIKASKQEYLCLLINPKLVTKFLK
ITSFKIYINFRLKTFYISPNKYNNFYIAPSEEKANHLLKEEKTWA
KIVEEGGEES*
L60 K145R protein
SEQ ID No. 346
MDHYLKKLQDIYTKLEGHPFLFSPSKTNEKEFITLLNQALASTQL
YRSIQQLFLTMYKLDPIGFINYIKTSKQEYLCLLINPKLVTKFLK
ITSFKIYINFRLKTFYISPNKYNNFYTAPSEEKTNHLLKEEKTWA
KIVEEGGEES*
Malawi Lil-20/1 (1983) K145R protein
SEQ ID No. 347
MDHYLKKLEDIYKKLEGHPFLFSPSKTNEKEFITLLNQALASTQL
YRSIQQLFLTMYKLDPIGFINYIKTSKQEYLCLLINPKLVTKFLK
ITSFKIYINFRLKTFYISPNKYNNFYTAPSEEKANHLLKEEKTWA
KIVEEGGEES*
Mkuzi 1979 K145R protein
SEQ ID No. 348
MDHYLKKLQDIYTKLEGHPFLFSPSKTNEKEFITLLNQALASTQL
YRSIQQLFLTMYKLDPIGFINYIKTSKQEYLCLLINPKLVTKFLK
ITSFKIYINFRLKTFYISPNKYNNFYTAPSEEKTNHLLKEEKTWA
KIVEEGGGEES*
Pretorisuskop/96/4 K145R protein
SEQ ID No. 349
MDHYLKKLQEIYTKLEGHPFLFSPSKTNEKEFITLLNQALASTQL
YRSIQQLFLTMYKLDPIGFINYIKTSKQEYLCLLINPKLVTKFLK
ITSFKIYINFRLKTFYISPNKYNNFYTAPSEEKTNHLLKEEKTWA
KIVEEGGEES*
Tengani 62 K145R protein
SEQ ID No. 350
MDHYLKKLQDIYTKLEGHPFLFSPSKTNEKEFITLLNQALASTQL
YRSIQQLFLTMYKLDPIGFINYIKTSKQEYLCLLINPKLVTKFLK
ITSFKIYINFRLKTFYISPNKYNNFYTAPSEEKTNHLLKEEKTWA
KIVEEGGEES*
Warmbaths K145R protein
SEQ ID No. 351
MDHYLKKLQDIYTKLEGHPFLFSPSKTNEKEFITLLNQALASTQL
YRSIQQLFLTMYKLDPIGFINYIKTSKQEYLCLLINPKLVTKFLK
ITSFKIYINFRLKTFYISPNKYNNFYTAPSEEKTNHLLKEEKTWA
KIVEEGGGEES*
Warthog K145R protein
SEQ ID No. 352
MDHYLKKLQDIYTKLEGHPFLFSPSKTNEKEFITLLNQALASTQL
YRSIQQLFLTMYKLDPIGFINYIKTSKQEYLCLLINPKLVTKFLK
ITSFKIYINFRLKTFYISPNKYNNFYTAPSEEKTNHLLKEEKTWA
KIVEEGGEES*

[0178] In an embodiment the ASFV of the invention does not express K145R protein. In other words, the ASFV of the invention does not express any proteins with sequences of SEQ ID Nos 340, 341, 342, 343, 344, 345, 346, 347, 348, 349, 350, 351 or 352.

[0179] K145R inhibits the host endoplasmic reticulum (ER) stress response (Barber 2015 Stress modulators encoded by African swine fever virus; PHD thesis, St Georges, University of London, 2016). This response is caused by the accumulation of unfolded proteins and may be activated during viral infections due to the substantial amounts of viral proteins being produced. ER stress leads to the increase in expression of the transcription factor CCAAT-enhancer-binding protein homologous protein (CHOP) and its accumulation in the nucleus of the cells. CHOP activity ultimately results in cell apoptosis, thus limiting viral replication.

[0180] K145R function may be tested by methods including immunofluorescence using an antibody against CHOP and assessment of its presence in the nucleus of cells following induction of ER stress, and luciferase reporter assay, where the luciferase gene is under control of the CHOP promoter.

### B125R

[0181] The gene (i.e. nucleotide) sequences of B125R genes from different ASFV strains are given below.

Benin 97/1 B125R (NC_044956.1:100206-100583)
SEQ ID No. 353
ATGGCGGTTTATGCGAAGGATCTTGATAATAACAAAGAGTTAAACCAAAAATTAATTAACGATCAGCTTAAAATTATTGACAC
GCTCTTGCTAGCAGAAAAAAAAAACTTTTTGGTGTATGAATTGCCTGCCCCTTTTGACTTTTCCTCCGGCGACCCTTTGGCCA
GTCAGCGCGACATATACTATGCCATCATAAAAAGCCTCGAGGAGCGCGGGTTTACTGTCAAAATATGTATGAAAGGGGATCGT
GCCCTCCTTTTCATCACTTGGAAAAAAATACAATCCATTGAGATAAACAAAAAAGAAGAATATCTGCGCATGCACTTCATACA
AGACGAAGAGAAAGCATTTTATTGTAAATTTTTAGAGTCTAGATGA
China/2018/AnhuiXCGQ B125R (MK128995.1:105587-105964)
SEQ ID No. 354
ATGGCGGTTTATGCGAAGGATCTTGATAATAACAAAGAGTTAAACCAAAAATTAATTAACGATCAGCTTAAAATTATTGACAC
GCTCTTGCTGGCAGAAAAAAAAAACTTTTTGGTGTATGAACTACCTGCCCCTTTTGACTTTTCCTCCGGCGACCCTTTGGCCA
GTCAGCGCGACATATACTATGCCATCATAAAAAGCCTCGAGGAGCGCGGGTTTACTGTCAAAATATGTATGAAAGGGGATCGT
GCCCTCCTTTTCATCACCTGGAAAAAAATACAATCCATTGAGATAAACAAAAAAGAAGAATATCTGCGCATGCACTTCATACA
AGACGAAGAGAAAGCATTTTATTGTAAATTTTTAGAGTCTAGATGA
Georgia 2007/1 B125R (NC_044959.1:105570-105947)
SEQ ID No. 355
ATGGCGGTTTATGCGAAGGATCTTGATAATAACAAAGAGTTAAACCAAAAATTAATTAACGATCAGCTTAAAATTATTGACAC
GCTCTTGCTGGCAGAAAAAAAAAACTTTTTGGTGTATGAACTACCTGCCCCTTTTGACTTTTCCTCCGGCGACCCTTTGGCCA
GTCAGCGCGACATATACTATGCCATCATAAAAAGCCTCGAGGAGCGCGGGTTTACTGTCAAAATATGTATGAAAGGGGATCGT
GCCCTCCTTTTCATCACCTGGAAAAAAATACAATCCATTGAGATAAACAAAAAAGAAGAATATCTGCGCATGCACTTCATACA
AGACGAAGAGAAAGCATTTTATTGTAAATTTTTAGAGTCTAGATGA
Ken05/Tk1 B125R (NC_044945.1:106516-106893)
SEQ ID No. 356
ATGGCGGTTTATGCGAAGGACCTTGATAATAACAAAGAGTTAAACCAAAAATTGATCAACGATCAGCTTAAAATCATTGACAC
GCTTTTGCTAGCAGAAAAAAAAAACTTTTTGGTGTACGAACTACCTGCCCATTTTGACTTTTCCTCCGGCGACCCTTTGGGCA
GTCAGCGCGACATTTACTATGCCATCATAAAAAGTCTCGAGGAGCGCGGATTTACTGTCAAAATATGTATGAAGGGAGACCGC
GCCCTTCTTTTCATCACCTGGAAAAAAATACAATCCATTGAGATCAACAAAAAAGAAGAATATCTGCGCATGCACTTCATACA
AGACGAAGAGAAAGCGTTTTATTGTAAATTTTTAGAGTCTAGATGA
Ken06.Bus B125R (NC_044946.1:102432-102809)
SEQ ID No. 357
ATGGCGGTTTATGCGAAGGACCTTGATAATAACAAAGAGTTAAACCAAAAATTGATCAACGATCAGCTTAAAATTATTGACAC
GCTTTTGCTGGCAGAAAAAAAAAACTTTTTGGTGTACGAACTACCTGCCCATTTTGACTTTTCCTCCGGCGACCCTTTGGGCA
GTCAGCGCGACATTTACTATGCCATCATAAAAAGTCTCGAGGAGCGCGGATTTACTGTCAAAATATGTATGAAGGGAGACCGC
GCCCTTCTTTTCATCACCTGGAAAAAAATACAATCCATTGAGATCAACAAAAAAGAAGAATATCTGCGCATGCACTTCATACA
AGACGAAGAGAAAGCGTTTTATTGTAAATTTTTAGAGTCTAGATGA
Kenya 1950 B125R (AY261360.1:109401-109778)
SEQ ID No. 358
ATGGCGGTTTATGCGAAGGACCTTGATAATAACAAAGAGTTAAACCAAAAATTGATCAACGATCAGCTTAAAATCATTGACAC
GCTTTTGCTAGCAGAAAAAAAAAACTTTTTGGTGTACGAACTACCTGCCCATTTTGACTTTTCCTCCGGCGACCCTTTGGGCA
GTCAGCGCGACATTTACTATGCCATCATAAAAAGTCTCGAGGAGCGCGGATTTACTGTCAAAATATGTATGAAGGGAGACCGC
GCCCTTCTTTTCATCACCTGGAAAAAAATACAATCCATTGAGATCAACAAAAAAGAAGAATATCTGCGCATGCACTTCATACA
AGACGAAGAGAAAGCGTTTTATTGTAAATTTTTAGAGTCTAGATGA
L60 B125R (NC_044941.1:100308-100685)
SEQ ID No. 359
ATGGCGGTTTATGCGAAGGATCTTGATAATAACAAAGAGTTAAACCAAAAATTAATTAACGATCAGCTTAAAATTATTGACAC
GCTCTTGCTAGCAGAAAAAAAAAACTTTTTGGTGTATGAATTGCCTGCCCCTTTTGACTTTTCCTCCGGCGACCCTTTGGCCA
GTCAGCGCGACATATACTATGCCATCATAAAAAGCCTCGAGGAGCGCGGGTTTACTGTCAAAATATGTATGAAAGGGGATCGT
GCCCTCCTTTTCATCACTTGGAAAAAAATACAATCCATTGAGATAAACAAAAAAGAAGAATATCTGCGCATGCACTTCATACA
AGACGAAGAGAAAGCATTTTATTGTAAATTTTTAGAGTCTAGATGA
Malawi Lil-20/1 (1983) B125R (AY261361.1:103937-104314)
SEQ ID No. 360
ATGGCAGTTTATGCGAAAGATCTTGATAATAACAAAGAGTTAAACCAAAAATTAATTAACGATCAACTTAAAATTATTGACAC
GCTGTTGCTGGCAGAAAAAAAAAACTTTTTGGTGCATGAACTACCTGCCCACTATGACTTTTCCTCCGGCGACCCTTTGGCCA
GTCAGCGCGACATATACTATGCCATCATAAAAAGTCTCGAGGAGCGCGGATTTACTGTCAAAATTTGTATGAAAGGAGATCGC
GCCCTTCTTTTCATCACCTGGAAAAAAATACAATCCATTGAGATAAACAAAAAAGAAGAATATCTGCGCATGCACTTCATACA
AGATGAAGAGAAAGCATTTTATTGTAAATTTTTAGAGTCTAGATGA
Mkuzi 1979 B125R (AY261362.1:107379-107756)
SEQ ID No. 361
ATGGCGGTTTATGCGAAGGATCTTGATAATAACAAAGAGTTAAACCAAAAATTAATTAACGATCAGCTTAAAATTATTGACAC
GCTCTTGCTAGCAGAAAAAAAAAACTTTTTGGTGTATGAATTGCCTGCCCCTTTTGACTTTTCCTCCGGCGACCCTTTGGCCA
GTCAGCGCGACATATACTATGCCATCATAAAAAGCCTCGAGGAGCGCGGGTTTACTGTCAAAATATGTATGAAAGGGGATCGT
GCCCTCCTTTTCATCACTTGGAAAAAAATACAATCCATTGAGATAAACAAAAAAGAAGAATATCTGCGCATGCACTTCATACA
AGACGAAGAGAAAGCATTTTATTGTAAATTTTTAGAGTCTAGATGA
Pretorisuskop/96/4 B125R (AY261363.1:106504-106881)
SEQ ID No. 362
ATGGCGGTTTATGCGAAGGATCTTGATAATAACAAAGAGTTAAACCAAAAATTAATTAACGATCAGCTTAAAATTATTGACAC
GCTCTTGCTGGCAGAAAAAAAAAACTTTTTGGTGTATGAACTACCTGCCCCTTTTGACTTTTCCTCCGGCGACCCTTTGGCCA
GTCAGCGCGACATATACTATGCCATCATAAAAAGTCTCGAGGAGCGCGGGTTTACTGTCAAAATATGTATGAAAGGGGATCGC
GCCCTCCTTTTCATCACCTGGAAAAAAATACAATCCATTGAGATAAACAAAAAAGAAGAATATCTGCGCATGCACTTCATACA
AGACGAAGAGAAAGCATTTTATTGTAAATTTTTAGAGTCTAGATGA
Tengani 62 B125R (AY261364.1:100837-101214)
SEQ ID No. 363
ATGGCGGTGTATGCGAAGGACCTTGATAATAACAAAGAGTTAAACCAAAAATTAATTAACGATCAGCTTAAAATTATTGACAC
GCTCTTGCTGGCAGAAAAAAAAAACTTTTTGGTGTATGAACTACCTGCCCCTTTTGACTTTTCCTCCGGCGACCCTTTGGCCA
GTCAGCGTGACATATACTATGCCATCATAAAAAGTCTTGAGGAGCGCGGGTTTACTGTCAAAATATGTATGAAAGGGGATCGT
GCCCTCCTTTTCATCACCTGGAAAAAAATACAATCCATTGAAATAAACAAAAAAGAAGAATATCTGCGCATGCACTTCATACA
AGACGAAGAGAAATCATTTTATTGTAAATTTTTAGAGTCTAGATGA
Warmbaths B125R (AY261365.1:105532-105909)
SEQ ID No. 364
ATGGCGGTTTATGCGAAGGATCTTGATAATAACAAAGAGTTAAACCAAAAATTAATTAACGATCAGCTTAAAATTATTGACAC
GCTCTTGCTGGCAGAAAAAAAAAACTTTTTGGTGTATGAACTACCTGCCCCTTTTGACTTTTCCTCCGGCGACCCTTTGGCCA
GTCAGCGCGACATATACTATGCCATCATAAAAAGTCTCGAGGAGCGCGGGTTTACTGTCAAAATATGTATGAAAGGGGATCGC
GCCCTCCTTTTCATCACCTGGAAAAAAATACAATCCATTGAGATAAACAAAAAAGAAGAATATCTGCGCATGCACTTCATACA
AGACGAAGAGAAAGCATTTTATTGTAAATTTTTAGAGTCTAGATGA
Warthog B125R (AY261366.1:102258-102635)
SEQ ID No. 365
ATGGCGGTTTATGCGAAGGACCTTGATAATAACAAAGAGTTAAACCAAAAATTAATTAACGATCAGCTTAAAATTATTGACAC
GCTCTTGCTGGCAGAAAAAAAAAACTTTTTGGTGTATGAACTACCTGCCCCTTTTGACTTTTCCTCCGGCGACCCTTTGGCCA
GTCAGCGCGACATATACTATGCCATCATAAAAAGTCTCGAGGAGCGCGGGTTTACTGTCAAAATATGTATGAAAGGGGATCGC
GCCCTCCTTTTCATCACCTGGAAAAAAATACAATCCATTGAGATAAACAAAAAAGAAGAATATCTGCGCATGCACTTCATACA
AGACGAAGAGAAAGCATTTTATTGTAAATTTTTAGAGTCTAGATGA

[0182] In an embodiment an ASFV of the invention comprises a DIVA mutation that disrupts expression of the B125R gene. In other words, the ASFV lacks a functional version of the B125R gene. Suitably the B125R gene comprises the sequence of SEQ ID No. 353, 354, 355, 356, 357, 358, 359, 360, 361, 362, 363, 364 or 365. Suitably the B125R gene comprises a sequence having at least 70%, at least 80%, at least 90% or at least 95% identity with SEQ ID No. 353, 354, 355, 356, 357, 358, 359, 360, 361, 362, 363, 364 or 365. Suitably the B125R gene consists of the sequence of SEQ ID No. 353, 354, 355, 356, 357, 358, 359, 360, 361, 362, 363, 364 or 365.

[0183] In an embodiment of the ASFV of the invention the B125R gene may be partially or completely deleted. Suitably part or all of the sequence of SEQ ID No. 353, 354, 355, 356, 357, 358, 359, 360, 361, 362, 363, 364 or 365 is removed from the ASFV genome. Suitably the ASFV genome lacks any of these sequences.

[0184] The accessions numbers of B125R proteins from different strains of ASFV are listed below in Table 5.

TABLE 5

| Strain | B125R protein accession number |
|---|---|
| BA71V | Q65171 |
| PretoriuskopPr4/1996 | P0CA34 |
| Warthog | P0CA35 |
| Georgia 2007/1 | E0WMM1 |
| Portugal/OURT88/1988 | A9JLX0 |
| E75 | D4I5S1 |
| Benin 97/1 | A9JL41 |

[0185] The amino acid sequences of B125R proteins from different ASFV strains are depicted below.

Benin 97/1 B125R protein
SEQ ID No. 366
MAVYAKDLDNNKELNQKLINDQLKIIDTLLLAEKKNFLVYELPAPFDESSGDPLASQRDIYYAIIKSLEERGFTVKICMKGDR
ALLFITWKKIQSIEINKKEEYLRMHFIQDEEKAFYCKFLESR*
China/2018/AnhuiXCGQ B125R protein
SEQ ID No. 367
MAVYAKDLDNNKELNQKLINDQLKIIDTLLLAEKKNFLVYELPAPFDFSSGDPLASQRDIYYAIIKSLEERGFTVKICMKGDR
ALLFITWKKIQSIEINKKEEYLRMHFIQDEEKAFYCKFLESR*
Georgia 2007/1 B125R protein
SEQ ID No. 368
MAVYAKDLDNNKELNQKLINDQLKIIDTLLLAEKKNFLVYELPAPFDFSSGDPLASQRDIYYAIIKSLEERGFTVKICMKGDR
ALLFITWKKIQSIEINKKEEYLRMHFIQDEEKAFYCKFLESR
Ken05/Tk1 B125R protein
SEQ ID No. 369
MAVYAKDLDNNKELNQKLINDQLKIIDTLLLAEKKNFLVYELPAHFDFSSGDPLGSQRDIYYAIIKSLEERGFTVKICMKGDR
ALLFITWKKIQSIEINKKEEYLRMHFIQDEEKAFYCKFLESR*
Ken06.Bus B125R protein
SEQ ID No. 370
MAVYAKDLDNNKELNQKLINDQLKIIDTLLLAEKKNFLVYELPAHFDFSSGDPLGSQRDIYYAIIKSLEERGFTVKICMKGDR
ALLFITWKKIQSIEINKKEEYLRMHFIQDEEKAFYCKFLESR*
Kenya 1950 B125R protein
SEQ ID No. 371
MAVYAKDLDNNKELNQKLINDQLKIIDTLLLAEKKNFLVYELPAHFDFSSGDPLGSQRDIYYAIIKSLEERGFTVKICMKGDR
ALLFITWKKIQSIEINKKEEYLRMHFIQDEEKAFYCKFLESR*
L60 B125R protein
SEQ ID No. 372
MAVYAKDLDNNKELNQKLINDQLKIIDTLLLAEKKNFLVYELPAPFDFSSGDPLASQRDIYYAIIKSLEERGFTVKICMKGDR
ALLFITWKKIQSIEINKKEEYLRMHFIQDEEKAFYCKFLESR*
Malawi Lil-20/1 B125R protein
SEQ ID No. 373
MAVYAKDLDNNKELNQKLINDQLKIIDTLLLAEKKNFLVHELPAHYDFSSGDPLASQRDIYYAIIKSLEERGFTVKICMKGDR
ALLFITWKKIQSIEINKKEEYLRMHFIQDEEKAFYCKFLESR*
Mkuzi 1979 B125R protein
SEQ ID No. 374
MAVYAKDLDNNKELNQKLINDQLKIIDTLLLAEKKNFLVYELPAPFDFSSGDPLASQRDIYYAIIKSLEERGFTVKICMKGDR
ALLFITWKKIQSIEINKKEEYLRMHFIQDEEKAFYCKFLESR*
Pretorisuskop/96/4 B125R protein
SEQ ID No. 375
MAVYAKDLDNNKELNQKLINDQLKIIDTLLLAEKKNFLVYELPAPFDFSSGDPLASQRDIYYAIIKSLEERGFTVKICMKGDR
ALLFITWKKIQSIEINKKEEYLRMHFIQDEEKAFYCKFLESR*
Tengani 62 B125R protein
SEQ ID No. 376
MAVYAKDLDNNKELNQKLINDQLKIIDTLLLAEKKNFLVYELPAPFDFSSGDPLASQRDIYYAIIKSLEERGFTVKICMKGDR
ALLFITWKKIQSIEINKKEEYLRMHFIQDEEKSFYCKFLESR*
Warmbaths B125R protein
SEQ ID No. 377
MAVYAKDLDNNKELNQKLINDQLKIIDTLLLAEKKNFLVYELPAPFDFSSGDPLASQRDIYYAIIKSLEERGFTVKICMKGDR
ALLFITWKKIQSIEINKKEEYLRMHFIQDEEKAFYCKFLESR*
Warthog B125R protein
SEQ ID No. 378
MAVYAKDLDNNKELNQKLINDQLKIIDTLLLAEKKNFLVYELPAPFDFSSGDPLASQRDIYYAIIKSLEERGFTVKICMKGDR
ALLFITWKKIQSIEINKKEEYLRMHFIQDEEKAFYCKFLESR*

[0186] In an embodiment the ASFV of the invention does not express B125R protein. In other words, the ASFV of the invention does not express any proteins with sequences of SEQ ID Nos 366, 367, 368, 369, 370, 371, 372, 373, 374, 375, 376, 377 or 378.

[0187] B125R was identified as one of the most abundant viral proteins expressed in infected wild boar cells (WSL-R) (Kaβler et al. 2018 Sci. Rep. 8: 1471). As shown in FIG. 5, B125R expression can be detected at the cell surface indicating that B125R is likely to be exposed to antibodies and likely to induce a strong antibody response.

### Multigene Families (MGFs)

[0188] ASFV contains five multi-gene families which are present in the left and right variable regions of the genome. The MGFs are named after the average number of codons present in each gene: MGF100, 110, 300, 360 and 505/530. The N-terminal regions of members of MGFs 300, 360 and 505/530 share significant similarity with each other. It has been shown the MGF 360 and 505 families encode genes essential for host range function that involves promotion of infected-cell survival and suppression of type I interferon response.

[0189] An attenuated ASFV according to the present invention comprises a functional version of one or more of the following genes:
[0190] multigene family (MGF) 110 3L, 6L, 7L, 8L, 10L, 11L and 12L,
[0191] MGF 360 5L, 6L, 7L, 10L, 11L, 12L, 13L, 14L, 20R, 21R and 22R, and
[0192] MGF 505 1R, 2R and 6R.

[0193] In a further aspect the invention provides an attenuated African Swine Fever (ASF) virus in which the expression and/or activity of the genes EP153R and EP402R is disrupted;

[0194] and which comprises a functional version of one or more of the following genes:
[0195] multigene family (MGF) 110 11L and 12L,
[0196] MGF 360 6L, 10L, 11L, 12L, 13L, and 14L, and
[0197] MGF 505 1R and 2R.

[0198] Suitably, in one embodiment the invention provides an ASFV in which the expression and/or activity of the genes EP153R and EP402R is disrupted;

[0199] and which comprises a functional version of one or more of the following genes:
[0200] multigene family (MGF) 110 5L, 6L, 8L, and 12L, and
[0201] MGF 360 6L, 10L, 11L, 12L, 13L, 14L and 21R, and
[0202] MGF 505 1R and 2R.

[0203] Suitably, in one embodiment the invention provides an ASFV in which the expression and/or activity of the genes EP153R and EP402R is disrupted;

[0204] and which comprises a functional version of one or more of the following genes:
[0205] multigene family (MGF) 110 6L, 8L, and 12L, and
[0206] MGF 360 6L, 10L, 11L, 12L, 13L, 14L and 21R, and
[0207] MGF 505 1R and 2R.

[0208] Suitably, in one embodiment the invention provides an ASFV in which the expression and/or activity of the genes EP153R and EP402R is disrupted;

[0209] and which comprises a functional version of one or more of the following genes:
[0210] multigene family (MGF) 110 12L, and
[0211] MGF 360 6L, 10L, 11L, 12L, 13L, 14L, and
[0212] MGF 505 1R and 2R.

[0213] Suitably, in one embodiment the invention provides an ASFV in which the expression and/or activity of the genes EP153R and EP402R is disrupted;

[0214] and which comprises a functional version of one or more of the following genes:
[0215] multigene family (MGF) 360 6L, 10L, 11L, 12L, 13L, and 14L, and
[0216] MGF 505 1R and 2R.

[0217] The location of some of these genes in the genomes of a variety of ASFV strains is provided below in Table 6. The sequence identity of each gene to the corresponding Benin 97/1 gene is also provided.

TABLE 6a
MGF 360-10L

| | Start | Stop | % |
|---|---|---|---|
| | Nucleotide | Nucleotide | Nucleotide |
| Strain | Number | number | Identity |
| Benin 97/1 | 20677 | 19607 | 100 |
| Georgia 2007/1 | 26438 | 25368 | 93 |
| BA71V | Deleted | | |
| OURT88/3 | Deleted | | |
| Kenya 1950 | 30628 | 29563 | 82 |
| Malawi-Lil/20 | 24802 | 23763 | 91 |
| Mkuzi 1979 | 28139 | 27069 | 99 |
| Pretorisuskop/96/4 | 27186 | 26116 | 96 |
| Tengani 62 | 21600 | 20530 | 92 |
| Warmbaths | 26361 | 25322 | 94 |
| Warthog | 23130 | 22091 | 95 |
| E75 | 19981 | 18911 | 100 |

TABLE 6b
MGF 360-11L

| | Start | Stop | % |
|---|---|---|---|
| | Nucleotide | Nucleotide | Nucleotide |
| Strain | Number | number | Identity |
| Benin 97/1 | 21764 | 20703 | 100 |
| Georgia 2007/1 | 27526 | 26465 | 97 |
| BA71V | Deleted | | |
| OURT88/3 | Deleted | | |
| Kenya 1950 | 31716 | 30655 | 84 |
| Malawi-Lil/20 | 25892 | 24831 | 86 |
| Mkuzi 1979 | 29225 | 28164 | 99 |
| Pretorisuskop/96/4 | 28275 | 27214 | 97 |
| Tengani 62 | 22688 | 21627 | 97 |
| Warmbaths | 27449 | 26388 | 97 |
| Warthog | 24218 | 23157 | 97 |
| E75 | 21068 | 20007 | 100 |

TABLE 6c
MGF 360-12L

| | Start | Stop | % |
|---|---|---|---|
| | Nucleotide | Nucleotide | Nucleotide |
| Strain | Number | number | Identity |
| Benin 97/1 | 24668 | 23616 | 100 |
| Georgia 2007/1 | 30434 | 29382 | 96 |
| BA71V | Deleted | | |
| OURT88/3 | Deleted | | |
| Kenya 1950 | 34566 | 33549 | 90 |
| Malawi-Lil/20 | 28731 | 27682 | 92 |
| Mkuzi 1979 | 32125 | 31073 | 97 |
| Pretorisuskop/96/4 | 31150 | 30098 | 95 |
| Tengani 62 | 25592 | 24540 | 96 |
| Warmbaths | 30346 | 29294 | 96 |
| Warthog | 27088 | 26036 | 96 |
| E75 | 23971 | 22920 | 99 |

TABLE 6d
MGF 360-13L

| | Start | Stop | % |
|---|---|---|---|
| | Nucleotide | Nucleotide | Nucleotide |
| Strain | Number | number | Identity |
| Benin 97/1 | 25901 | 24840 | 100 |
| Georgia 2007/1 | 31656 | 30595 | 97 |
| BA71V | Deleted | | |
| OURT88/3 | Deleted | | |
| Kenya 1950 | 35812 | 34757 | 90 |
| Malawi-Lil/20 | 29980 | 28925 | 91 |
| Mkuzi 1979 | 33347 | 32286 | 99 |
| Pretorisuskop/96/4 | 32368 | 31307 | 95 |
| Tengani 62 | 26814 | 25753 | 95 |
| Warmbaths | 31559 | 30498 | 95 |
| Warthog | 28338 | 27277 | 95 |
| E75 | 25204 | 24143 | 99 |

TABLE 6e
MGF 360-14L

| | Start | Stop | % |
|---|---|---|---|
| | Nucleotide | Nucleotide | Nucleotide |
| Strain | Number | number | Identity |
| Benin 97/1 | 27146 | 26073 | 100 |
| Georgia 2007/1 | 32913 | 31840 | 99 |
| BA71V | Deleted | | |
| OURT88/3 | Deleted | | |
| Kenya 1950 | 37194 | 36121 | 92 |
| Malawi-Lil/20 | 31266 | 30193 | 92 |
| Mkuzi 1979 | 34620 | 33547 | 99 |
| Pretorisuskop/96/4 | 33598 | 32525 | 97 |
| Tengani 62 | 28056 | 26983 | 97 |
| Warmbaths | 32820 | 31747 | 96 |
| Warthog | 29568 | 28495 | 97 |
| E75 | 26449 | 25376 | 100 |

TABLE 6f
MGF 505-1R

| | Start | Stop | % |
|---|---|---|---|
| | Nucleotide | Nucleotide | Nucleotide |
| Strain | Number | number | Identity |
| Benin 97/1 | 21971 | 23566 | 100 |
| Georgia 2007/1 | 27734 | 29329 | 95 |
| BA71V | Deleted | | |
| OURT88/3 | Deleted | | |
| Kenya 1950 | 31904 | 33496 | 91 |
| Malawi-Lil/20 | 26041 | 27627 | 93 |
| Mkuzi 1979 | 29425 | 31020 | 96 |
| Pretorisuskop/96/4 | 28449 | 30044 | 94 |
| Tengani 62 | 22891 | 24486 | 95 |
| Warmbaths | 27651 | 29246 | 95 |
| Warthog | 24387 | 25982 | 95 |
| E75 | 21275 | 22870 | 100 |

TABLE 6g
MGF 505-2R

| | Start | Stop | % |
|---|---|---|---|
| | Nucleotide | Nucleotide | Nucleotide |
| Strain | Number | number | Identity |
| Benin 97/1 | 27352 | 28932 | 100 |
| Georgia 2007/1 | 33119 | 34699 | 99 |
| BA71V | 17725 | 19304 | 99 |
| OURT88/3 | 29532 | 29981 | 76 |
| Kenya 1950 | 37419 | 38985 | 90 |
| Malawi-Lil/20 | 31541 | 33121 | 93 |
| Mkuzi 1979 | 34826 | 36406 | 99 |
| Pretorisuskop/96/4 | 33795 | 35374 | 97 |
| Tengani 62 | 28261 | 29830 | 98 |
| Warmbaths | 33029 | 34597 | 96 |
| Warthog | 29773 | 31352 | 97 |
| E75 | 26655 | 28236 | 99 |

TABLE 6h
MGF 505-3R

| | Start | Stop | % |
|---|---|---|---|
| | Nucleotide | Nucleotide | Nucleotide |
| Strain | Number | number | Identity |
| Benin 97/1 | 29019 | 29861 | 100 |
| Georgia 2007/1 | 34786 | 35625 | 96 |
| BA71V | 20398 | 21915 | 100 |
| OURT88/3 | 20850 | 22367 | 100 |
| Kenya 1950 | 40295 | 41815 | 89 |
| Malawi-Lil/20 | 34322 | 35842 | 89 |
| Mkuzi 1979 | 37500 | 39017 | 99 |
| Pretorisuskop/96/4 | 36480 | 37985 | 89 |
| Tengani 62 | 30926 | 32443 | 90 |
| Warmbaths | 35712 | 37232 | 93 |
| Warthog | 32449 | 33954 | 90 |
| E75 | 29330 | 30847 | 100 |

[0218] The gene (i.e. nucleotide) sequences of these genes from different strains are given below.

### MGF 110 5L Gene Sequences

China/2018/AnhuiXCGQ (genotype II) 9145-8528 MGF 110 5L/6L fusion
SEQ ID No. 266
ATGTTGGTGATCTTCTTGGGAATTCTTGGCCTTCTGGCCAGCCAGGTTTCAAGTCAGCTCGTTGGACAACTTCGTCCAACAGA
GGAGCCTCCAGAGGAAGAACTCGAATACTGGTGTGCCTACATGGAAAGTTGCCAATTTTGCTGGGACTGCCAAGACGGCACTT
GTATAAACAAAATAGATGGGTCAGTAATTTACAAGAATGAGTATGTGAAATCATGTCTGGTTTCCCGTTGGCTGGATAAATGT
ATGTATGATTTAGATAAGGGTATCTACCATACCATGAATTGCAACCAGGTCTTAGGGCTACCTAATCAACCAGCTGGACAACT
TCATCCAACGGATAATCCTCCACAAGAAGAACTTGAATACTGGTGCACTTATACAGAAAACTGCAAGTTTTGCTGGAATTGTC
AAAATGGCCTTTGTGAGGGCAAATTGGAGAATACAACAATTCTTGAAAATGAGTATGTGCAATCATGTATAGTTTCCCGCTGG
CTAAATAAATGTATGTATGATCTAGGACAGGGGATTCACCATGTAATGGCCTGTTCTGAACCAAAGCCCTGGAATCCTTACAA
AATCTTAAAGAGAGAGTGGAAAGAAAATAATAGTTAA
Georgia 2007/1 (genotype II) 9140-8523 MGF 110 5L/6L fusion
SEQ ID No. 267
ATGTTGGTGATCTTCTTGGGAATTCTTGGCCTTCTGGCCAGCCAGGTTTCAAGTCAGCTCGTTGGACAACTTCGTCCAACAGA
GGAGCCTCCAGAGGAAGAACTCGAATACTGGTGTGCCTACATGGAAAGTTGCCAATTTTGCTGGGACTGCCAAGACGGCACTT
GTATAAACAAAATAGATGGGTCAGTAATTTACAAGAATGAGTATGTGAAATCATGTCTGGTTTCCCGTTGGCTGGATAAATGT
ATGTATGATTTAGATAAGGGTATCTACCATACCATGAATTGCAACCAGGTCTTAGGGCTACCTAATCAACCAGCTGGACAACT
TCATCCAACGGATAATCCTCCACAAGAAGAACTTGAATACTGGTGCACTTATACAGAAAACTGCAAGTTTTGCTGGAATTGTC
AAAATGGCCTTTGTGAGGGCAAATTGGAGAATACAACAATTCTTGAAAATGAGTATGTGCAATCATGTATAGTTTCCCGCTGG
CTAAATAAATGTATGTATGATCTAGGACAGGGGATTCACCATGTAATGGCCTGTTCTGAACCAAAGCCCTGGAATCCTTACAA
AATCTTAAAGAGAGAGTGGAAAGAAAATAATAGTTAA
Ken05/Tk1 9698-9327 MGF 110 5L
SEQ ID No. 268
ATGTTGGTGATCTTCTTGGGACTCCTTGGCCTGCTGGCCAACCAGGTCTTAGGGCTACCTAATCAACCAGCTGGACAACTTCA
TCCAACGGATAATCCTCCAAAAGAAGAACTTGGATACTGGTGCACTTACACGGAAAGCTGTAAATTTTGCTGGAACTGTCAAA
ATGGCCTTTGTGAGGGCAAATTGGAGAATACAACAATTCTTGAAAATGAGTATGTGCAATCATGTATAGTTTCCCGCTGGCTA
AATAAATGTATGTATGATCTAGGACAGGGGATTGACCATGTAATGGCCTGTTCTGAACCAAAGCCCTGGAATCCTTACAAAAT
CTTAAAGAGAGAGTGGAAAAAAAATGTCAGCCAAAATTAA
Ken06.Bus 6224-5853 MGF 110 5L
SEQ ID No. 269
ATGTTGGTGATCTTCTTGGGACTCCTTGGCCTGCTGGCCAACCAGGTCTTAGGGCTACCTAATCAACCAGCTGGACAACTTCA
TCCAACGGATAATCCTCCAAAAGAAGAACTTGGATACTGGTGCACTTACACGGAAAGCTGTAAATTTTGCTGGAACTGTCAAA
ATGGCCTTTGTGAGGGCAAATTGGAGAATACAACAATTCTTGAAAATGAGTATGTGCAATCATGTATAGTTTCCCGCTGGCTA
AATAAATGTATGTATGATCTAGGACAGGGGATTCACCATGTAATGCCCTGTTCTGAACCAAAGCCCTGGAATCCTTACAAAAT
CTTAAAGAAAGAGTGGAAAGAAAATGTCAGCCAAAATTAA
Malawi Lil-20/1/1983 7878-7516 MGF 110 5L
SEQ ID No. 270
ATGTTGGTTATCTTCTTGGGAATTCTTGGCCTTCTGGCCAACCAGGTCTCAAGCCAGCTCGTTGGACAACTTCATCCAACGGA
AAATCCTTCAGAGAATGAACTTGAATACTGGTGCACTTACATGGAATGTTGCCAGTTTTGCTGGGACTGTCAAGATGGCCTTT
GTGTGAATAAGTTGGGAAATACAACAATTCTTGAAAATGAGTATGTGCATCCATGTATAGTTTCCCGCTGGCTAAATAAATGT
ATGTATGATCTGGGTCAAGGCATTGATCATGTAATGGTCTGTTCTCAACCAAAGTACTGGAATCCTTATAAAATCTTAAAGAA
AGAGTGGAAAGAAAATAACAGCCAAAATTAA
Mkuzi 1979 (genotype XII) 10334-9972 MGF 110 5L
SEQ ID No. 271
ATGTTAGTAATCTTCTTGGGAATTCTTGGCCTTCTGGCCAACCAGGTCTCAAGCCAGCTCGTTGGACAACTTCATCCAACGGA
AAATCCTTCAGAGAATGAACTTGAATACTGGTGCACTTACATGGAATGTTGCCAGTTTTGCTGGGACTGTCAAGATGGCCTTT
GTGTGAATAAGTTGGGAAATACAACAATTCTTGAAAATGAGTATGTGCATCCATGTATAGTTTCCCGCTGGCTAAATAAATGC
ATGTATGATCTGGGTCAAGGCATTGATCATGTAATGGTCTGTTCTCAACCAAAGTACTGGAATCCTTATAAAATCTTAAAGAA
AGAGTGGAAAGAAAATAACAGTCAAAATTAA
Pretorisuskop/96/4 (genotype XX/I) 9424-9059 MGF 110 5L
SEQ ID No. 272
ATGTTAGTAATCTTCTTGGGAATTCTTGGCCTTCTGGCCAACCAGGTCTCAAGCCAGCTCGTTGGACAACTTCATCCAACGGA
AAATCCTTCAGAGAATGAACTTGAATACTGGTGCACTTACATGGAATGTTGCCAGTTTTGCTGGGACTGTCAAAATGGCCTTT
GTGTGAATAAGTTGGGAAATACAACAATTCTTGAAAATGAGTATGTGCATCCATGTATAGTTTCCCGCTGGCTAAATAAATGT
ATGTATGATCTGGGTCAAGGCATTGATCATGTAATGGTCTGTTCTCAGCCAAAATACTGGAATCCTTATAAAATCTTAAAGAA
AGAGTGGAAAGAAAATAACAGCCAAAATAAATAA
Tengani62 (genotype V/I) 8803-8447 MGF 110 5L
SEQ ID No. 273
ATGTTAGTCATCTTCTTGGGAATTCTTGGCCTTCTGGTCAACCAGGTCTCAAGCCAGCCAGTTGGACAACTTCATCCAACGGA
AAATCCTTCAGAGAATGAACTTGAATACTGGTGCACTTACATGGAATGTTGCCAGTTTTGCTGGGACTGTCAAAATGGCCTTT
GTGTGAATAAGTTGGGAAATACAACAATTCTTGAAAATGAGTATGTGCATCCATGTATAGTTTCCCGCTGGCTAAATAAATGT
ATGTATGATCTGGGTCAAGGCATTGATCATGTAATGGTCTGTTCTCAACCAAAATACTGGAATCCTTATAAAATCTTAAAGAA
AGAGTGGAAAGAAAATAATAGTTAA
Warmbaths (genotype III/I) 8649-8284 MGF 110 5L
SEQ ID No. 274
ATGTTAGTAATCTTTTTGGGAATTCTTGGCCTTCTGGCCAACCAGGTCTCAAGCCAGCTCGTTGGACAACTTCATCCAACGGA
AAATCCTTCAGAGAATGAACTTGAATACTGGTGCACTTACATGGAATGTTGCCAGTTTTGCTGGGACTGTCAAAATGGCCTTT
GTGTGAATAAGTTGGGAAATACAACAATTCTTGAAAATGAGTATGTGCATCCATGTATAGTTTCCCGCTGGCTAAATAAATGT
ATGTACGATCTGGGTCAAGGCATTGATCATGTAATGGTCTGTTCTCAACCAAAATACTGGAATCCTTATAAAATCTTAAAGAA
AGAGTGGAAAGAAAATAACAGCCAAAATAAATAA
Warthog (genotype IV) 7349-6984 MGF 110 5L
SEQ ID No. 275
ATGTTAGTAATCTTCTTGGGAATTCTTGGCCTTCTGGCCAACCAGGTCTCAAGCCAGCTCGTTGGACAACTTCATCCAACGGA
AAATCCTTCAGAGAATGAACTTGAATACTGGTGCACTTACATGGAATGTTGCCAGTTTTGCTGGGACTGTCAAAATGGCCTTT
GTGTGAATAAGTTGGGAAATACAACAATTCTTGAAAATGAGTATGTGCATCCATGTATAGTTTCCCGCTGGCTAAATAAATGT
ATGTACGATCTGGGTCAAGGCATTGATCATGTAATGGTCTGTTCTCAACCAAAATACTGGAATCCTTATAAAATCTTAAAGAA
AGAGTGGAAAGAAAATAACAGCCAAAATAAATAA

[0220] In an embodiment the attenuated ASFV of the invention comprises a functional version of MGF 110 5L. Suitably the functional version of MGF 110 5L comprises the sequence of SEQ ID No. 266, 267, 268, 269, 270, 271, 272, 273, 274 or 275. Suitably the functional version of MGF 110 5L comprises a sequence having at least 70%, at least 80%, at least 90% or at least 95% identity with SEQ ID No. 266, 267, 268, 269, 270, 271, 272, 273, 274 or 275. Suitably the functional version of MGF 110 5L consists of the sequence of SEQ ID No. 266, 267, 268, 269, 270, 271, 272, 273, 274 or 275.

### MGF 110 6L Gene Sequences

Ken05/Tk1 MGF 110 6L
SEQ ID No. 35
ATGTTGGTAATCTTTTTGGGAATTCTTGGCCTTCTGGCCAGCCAGGTCTCAAGTCAACCAGATGGACAACTTCGTCCAACAGA
GGATCCTCCAGAAGAAGAACTTAAATATTGGTGCACCTACATGGAAAGTTGCCAGTTTTGTTGGGACTGCCAAGATGGCAATT
GTATAAACAAAGTAGATGGGTCAGTCATTTATAAAAATGAGTTTGTGCGACCATGTTCAGTTTCCCGCTGGATGAATAAATGT
ATGTATGATTTAAATAAGGGTATCTATCATACAATGAATTGTTCTCAGCCACAGTCTTGGAATCCCTACAAATACTTCAGGAA
GGAGTGGAAAAAAGATGAACTCTAG
Ken06.Bus MGF 110 6L
SEQ ID No. 36
ATGTTGGTGATCTTTTTGGGAATTCTTGGCCTTCTGGCCAGCCAGGTCTCAAGTCAGCCAGTTGGACAACTTCGTCCAACAGA
GGACCCTCCAGAGAATGAACTCGAATATTGGTGCACCTACATGGAAAGTTGCCAGTTTTGCTGGGACTGTCAAGATGGCAATT
GTATAAACAAAGTAGATGGGTCAGTCATTTATAAAAATGAGTATGTGCAACCATGTTCAGTTTCCCGCTGGCTAAATAAATGT
ATGTATGATTTAGATAAGGGTATCTATCATACAATGAACTGTTCTCAGCCACGGTCTTGGAATCCCTACAAATGTTTCAGGAA
GGAGTGGAAAAAAGATGAACTCTAG
Kenya 1950 MGF 110 6L
SEQ ID No. 37
ATGTTGGTGATCTTTTTGGGAATTCTTGGCCTTATGGCCAGCCAGGTCTTAGGGCTACCATCTAATCAACCAACTGGACAACT
TCGTCCAACAGAGGATCCTCCAGAGGAAGAACTCGAATACTGGTGTGCCTACATGGAAAGTTGCCAGTTTTGCTGGGACTGCC
AAGATGGCAATTGCATAAACAAAATAGATGGGTCAGTCATTTATAAAAATGAGTTTGTGCGACCATGTTCAGTTTCCCGCTGG
ATGGATAAATGTATGTATGATTTAAATAAGGGTATCTATCATACAATGAATTGTTCTCAGCCACAGTCTTGGAATCCCTACAA
ATACTTCAGGAAGGAGTGGAAAAAAGATGAACTCTAG
Malawi Lil-20/1 (1983) MGF 110 6L
SEQ ID No. 38
ATGTTGGTGACCTTTTTGGGAATTCTTGGCCTTCTGGCCAGCCAGGTCTCAAGTCAGCTCGTTGGACAACTTCGTCCAACAGA
GGATCCTCCAGAGGAAGAACTCGAATACTGGTGCGCCTACATGGAAAGTTGCCAGTTTTGCTGGGACTGCCAAGATGGCAATT
GTATAAACAAAATAGATGGGTCAGTCATTTATAAAAATGAGTATGTGCGACCATGTTCAGTTTCCCGTTCGATGGATAAATGT
ATGTATGATTTAAATAAGGGTATCTACCATAGCATGAGCTGTTCTGACCCAAAGGCCTGGAATCCCTACAAATACTTCAGGAA
GGAATGGAAAAAAGATGAACTCTAG
Mkuzi 1979 MGF 110 6L
SEQ ID No. 39
ATGTTGGTGATCTTTTTGGGAATTCTTGGCCTTCTGGCCAGCCAGGTTTCAAGTCAACTCGTTGGACAACTTCGACCAACAGA
GGATCCTCCAGAGGAAGAACTCGAATACTGGTGCGCCTACATGGAAAGTTGCCAATTTTGCTGGGACTGCCAAGATGGCACTT
GTATAAACAAAATAGATGGGTCAGTAATTTACAAGAATGAGTATGTGAAAGCATGTCTGGTTTCCCGTTGGCTGGATAAATGT
ATGTATGATTTAGATAAAGGTATCTACCATACCATGAATTGTTCTCAGCCATGGTCTTGGAATCCTTACAAATACTTCAGGAA
GGAATGGAAAAAAGATGAACTCTAG
Pretorisuskop/96/4 MGF 110 6L
SEQ ID No. 40
ATGTTGGTGATCTTCTTGGGAATTCTTGGCCTTCTGGCCAGCCAGGTTTCAAGTCAGCTCGTTGGACAACTTCGTCCAACAGA
GGATCCTCCAGAGGAAGAACTCGAATACTGGTGCGCCTACATGGAAAGTTGCCAATTTTGCTGGGACTGCCAAGATGGCACTT
GTATAAACAAAATAGATGGGTCAGTAATTTACAAGAATGAGTATGTGAAATCATGTCTGGTTTCCCGTTGGCTGGATAAATGT
ATGTATGATTTAGATAAAGGTATCTACCATACCATGAATTGTTCTCAGCCATGGTCTTGGAATCCTTACAAATACTTCAGGAA
GGAATGGAAAAAAGATGAACTCTAG
Tengani62 MGF 110 6L
SEQ ID No. 41
ATGTTGGTGATCTTCTTGGGAATTTTTGGCCTTCTGGCCAGCCAGGTTTCAAGTCAGCTCGTTGGACAACTTCGTCCAACAGA
GGATCCTCCAGAGGAAGAACTCGAATACTGGTGTGCCTACATGGAAAGTTGCCAATTTTGCTGGGACTGCCAAGATGGCACTT
GTATAAACAAAATAGATGGGTCAGTAATTTACAAGAATGAGTATGTGAAATCATGTCTGGTTTCCCGTTGGCTGGATAAATGT
ATGTATGATTTAGATAAGGGTATCTACCATACCATGAATTGTTCTCAGCCATGGTCTTGGAATCCTTACAAATACTTCAGGAA
GGAATGGAAAAAAGATGAACTCTAG
Warmbaths MGF 110 6L
SEQ ID No. 42
ATGTTGGTGATCTTCTTGGGAATTCTTGGCCTTCTGGCCAGCCAGGTTTCAAGTCAGCTCGTTGGACAACTTCGTCCAACAGA
GGATCCTCCAGAGGAAGAACTCGAATACTGGTGCGCCTACATGGAAAGTTGCCAATTTTGCTGGGACTGCCAAGATGGCACTT
GTATAAACAAAATAGATGGGTCAGTAATTTACAAGAATGAGTATGTGAAATCATGTCTGGTTTCCCGTTGGCTGGATAAATGT
ATGTATGATTTAGATAAAGGTATCTACCATACCATGAATTGTTCTCAGCCATGGTCTTGGAATCCTTACAAATACTTCAGGAA
GGAATGGAAAAAAGATGAACTCTAG
Warthog MGF 110 6L
SEQ ID No. 43
ATGTTGGTGATCTTCTTGGGAATTCTTGGCCTTCTGGCCAGCCAGGTTTCAAGTCAGCTCGTTGGACAACTTCGACCAACAGA
GGATCCTCCAGAGGAAGAACTCGAATACTGGTGCGCCTACATGGAAAGTTGCCAATTTTGCTGGGACTGCCAAGATGGCACTT
GTATAAACAAAATAGATGGGTCAGTAATTTACAAGAATGAGTATGTGAAATCATGTCTGGTTTCCCGTTGGCTGGATAAATGT
ATGTATGATTTAGATAAAGGTATCTACCATACCATGAATTGTTCTCAGCCATGGTCTTGGAATCCTTACAAATACTTCAGGAA
GGAATGGAAAAAAGATGAACTCTAG

[0222] In an embodiment the attenuated ASFV of the invention comprises a functional version of MGF 110 6L. Suitably the functional version of MGF 110 6L comprises the sequence of SEQ ID No. 35, 36, 37, 38, 39, 40, 41, 42 or 43. Suitably the functional version of MGF 110 6L comprises a sequence having at least 70%, at least 80%, at least 90% or at least 95% identity with SEQ ID No. 35, 36, 37, 38, 39, 40, 41, 42 or 43. Suitably the functional version of MGF 110 6L consists of the sequence of SEQ ID No. 35, 36, 37, 38, 39, 40, 41, 42 or 43.

### MGF 110 7L Gene Sequences

China/2018/AnhuiXCGQ MGF 110 7L
SEQ ID No. 247
ATGCTGGTGATTATCCTGGGAATTATTGGCCTGCTGGCCAGTAGCAACCTGGTTTCATCCTCCACTTCTACTCGGGTAGGTGG
ACATCTTCCTCTAACATTTGAACCCCCAGAGAATGAACTTGGATACTGGTGCACTTATGTGGAAAGCTGTCGGTTCTGCTGGG
ATTGTGAAGATGGGATTTGTACCAGCAGGGTTTGGGGAAACAACTCCACAAGTATTATTGAGAATGACTATGTAAAATATTGT
GAGGTTTCCCGCTGGGGTGACCTATGTAGATATGATGTGGAGGAGCACATTTACCATAGCATGAACTGTTCTGACCCAAAGCC
CTGGAATCCTTATAAAATTGCAAGGAAGGAGTGGAAAAAGAATGAACATCCCAGAAAGGATTTGAAAAAAGATGAATTCTAG
Georgia 2007/1 MGF 110 7L
SEQ ID No. 248
ATGCTGGTGATTATCCTGGGAATTATTGGCCTGCTGGCCAGTAGCAACCTGGTTTCATCCTCCACTTCTACTCGGGTAGGTGG
ACATCTTCCTCTAACATTTGAACCCCCAGAGAATGAACTTGGATACTGGTGCACTTATGTGGAAAGCTGTCGGTTCTGCTGGG
ATTGTGAAGATGGGATTTGTACCAGCAGGGTTTGGGGAAACAACTCCACAAGTATTATTGAGAATGACTATGTAAAATATTGT
GAGGTTTCCCGCTGGGGTGACCTATGTAGATATGATGTGGAGGAGCACATTTACCATAGCATGAACTGTTCTGACCCAAAGCC
CTGGAATCCTTATAAAATTGCAAGGAAGGAGTGGAAAAAGAATGAACATCCCAGAAAGGATTTGAAAAAAGATGAATTCTAG
Ken05/Tk1 MGF 110 7L
SEQ ID No. 249
ATGCTGGTGATTATCCTGGGAGTTATTGGCCTGCTGGCCAGTAGCAACTTGGTTTCATCCTCCACTTCTACTCGGATAGGTGG
ACATCTTCCTCTAACATTTGATCCTCCAGAGAATGAACTTGGATACTGGTGCACTTATGTGGAAAGCTGTCGGTTCTGCTGGG
ATTGTGAAGATGGGGTCTGTACTAGCAGGATCTGGGGGAACAACTCCACAAGTATTGTTGAGAACAGCTATGTAAAATATTGT
GAAGTTTCCCGCTGGGGTGACCAGTGTAGATATGATGTGGAGGAGCGCATTTACCATACCATGAACTGTTCTGACCCAAAACC
CTGGAATCCTTATAAAATTACAAGGGTGGAGTGGAAAAAGAATGAACATTTCAGAAAGGATTTGAAAAAAGATGAATTCTAG
Kenya 1950 MGF 110 7L
SEQ ID No. 250
ATGCTGGTGATTATCCTGGGAGTTATTGGCCTGCTGGCCAGTAGCAACTTGGTTTCATCCTCCACTTCTACTCGGGTAGGTGG
ACATCTTCCTCTAACATTTGATCCTCCAGAGAATGAACTTGGATACTGGTGCACTTATGTGGAAAGCTGTCGGTTCTGCTGGG
ATTGTGAAGATGGGGTCTGTACTAGCAGGATCTGGGGGAACAACTCCACAAGTATTGTTGAGAACAGCTATATAAAATATTGT
GAAGTTTCCCGCTGGGGTGACCAGTGTAGATATGATGTGGAGGAGCACATTTACTATACCATGAACTGTTCTGACCCAAAGCC
CTGGAATCCTTATAAAATTGCAAGGAAGGAGTGGAAAAAGAATGAACATTTCAGAAAGGATTTGAAAAAAGATGAATTCTAG
Malawi Lil-20/1 (1983) MGF 110 7L
SEQ ID No. 251
ATGCTGGTGATTATCCTGGGAGTTATTGGCCTGCTGGCCAGTAGCAACTTGGTTTCATCCTCCACTTCTACTCGGGTAGGTGG
ACATCTTCCTCTAACATTTGATCCTCCAGAGAATGAACTTGGATACTGGTACACTTATGTGGAAAGTTGTCGGTTCTGCTGGG
ATTGTGAAGATGGGGTCTGTACTAGCAGGGTTTGGGGAAACAACTCCACAAGTATTGTTGAGAATGACTATGTAAAATATTGT
GAGGTTTCTCGCTGGGGTGACCAATGTAGATATGATGTGGAGGAGCACATTTACTATACCATGAACTGTTCTGACCCAAAGCC
CTGGAATCCTTATAAAATTGCAAAGGAAGGAGTGGAAAAAGGATGA
Mkuzi 1979 MGF 110 7L
SEQ ID No. 252
ATGCTGGTGATTATCCTGGGAGTTATTGGCCTGCTGGCCAGTAGCAACTTGGTTTCATCCTCCACTTCTACTCGGGTAGGTGG
ACATCTTCCTCTAACAGAGGATCCTCCAGAGAATGAACTTGGATACTGGTGCACTTATGTGGAAAGCTGTCGGTTCTGCTGGG
ATTGTGAAGATGGGATTTGTACTAGCAGGGTTTGGGGAAACAACTCCACAAGTATTGTTGAGAACGACTATGTAAAATATTGT
GAGGTTTCTCGCTGGGGTGACCAATGTAGATATGATGTAGAGGAGCACATTTACTATACCATGAACTGTTCTGACCCAAAGCC
CTGGAATCCTTATAAAATTGCAAGGAAGGAGTGGAAAAAGGATGAACATTCCAGAAAGAATTTGAAAAAAGATGAATTCTAG
Pretorisuskop/96/4 MGF 110 7L
SEQ ID No. 253
ATGCTGGTGATTATCCTGGGAATTATTGGCCTGCTGGCCAGTAGCAACCTGGTTTCATCCTCCACTTCTACTCGGGTAGGTGG
ACATCTTCCTCTAACATTTGATCCCCCAGAGAATGAACTTGGATACTGGTGCACTTATGTGGAAAGCTGTCGGTTCTGCTGGG
ATTGTGAAGATGGGATTTGTACCAGCAGGGTTTGGGGAAACAACTCCACAAGTATTGTTGAGAATGACTATGTAAAATATTGT
GAGGTTTCCCGCTGGGGAAACCTATGTAGATATGATGTGGAGGAGCACATTTACTATAGCATGAACTGTTCTGACCCAAAGCC
CTGGAATCCTTATAAAATTGCAAGGAAGGAGTGGAAAAAGAATGAATATCTCAGAAAGGATTTGAAAAAAGATGAATTCTAG
Tengani 62 MGF 110 7L
SEQ ID No. 254
ATGAACTGTTCTGACCCAAAGCCCTGGAATCCTTATAAAATTGCAAGGAAGGAGTGGAAAAAGAATGAACATCCCAGAAAGGA
TTTGAAAAAAGATGAATTCTAG
Warmbaths MGF 110 7L
SEQ ID No. 255
ATGCTGGTGATTATCCTGGGAATTATTGGCCTGCTGGCCAGTAGCAACCTGGTTTCATCCTCCACTTCTACTCGGGTAGGTGG
ACATCTTCCTCTAACATTTGATCCCCCAGAGAATGAACTTGGATACTGGTGCACTTATGTGGAAAGCTGTCGGTTCTGCTGGG
ATTGTGAAGATGGGATTTGTACCAGCAGGGTTTGGGGAAACAACTCCACAAGTATTGTTGAGAATGACTATGTAAAATATTGT
GAGGTTTCCCGCTGGGGTAACCTATGTAGATATGATGTGGAGGAGCACATTTACCATAGCATGAACTGCTCTGACCCAAAGCC
CTGGAATCCTTATAAAATTGCAAGGAAGGAGTGGAAAAAGAATGAACATCCCAGAAAGGATTTGAAAAAAGATGAATTCTAG
Warthog MGF 110 7L
SEQ ID No. 256
ATGCTGGTGATTATCCTGGGAATTATTGGCCTGCTGGCCAGTAGCAACCTGGTTTCATCCTCCACTTCTACTCGGGTAGGTGG
ACATCTTCCTCTAACATTTGATCCCCCCGAGAATGAACTTGGATACTGGTGCACTTATGTGGAAAGCTGTCGGTTCTGCTGGG
ATTGTGAAGATGGGATTTGTACCAGCAGGGTTTGGGGAAACAACTCCACAAGTATTGTTGAGAATGACTATGTAAAATATTGT
GAGGTTTCCCGCTGGGGTAACCTATGTAGATATGATGTGGAGGAGCACATTTACCATAGCATGAACTGCTCTGACCCAAAGCC
CTGGAATCCTTATAAAATTGCAAGGAAGGAGTGGAAAAAGAATGAACATCCCAGAAAGGATTTGAAAAAAGATGAATTCTAG

[0224] In an embodiment the attenuated ASFV of the invention comprises a functional version of MGF 110 7L. Suitably the functional version of MGF 110 7L comprises the sequence of SEQ ID No. 247, 248, 249, 250, 251, 252, 253, 254, 255 or 256. Suitably the functional version of MGF 110 7L comprises a sequence having at least 70%, at least 80%, at least 90% or at least 95% identity with SEQ ID No. 247, 248, 249, 250, 251, 252, 253, 254, 255 or 256. Suitably the functional version of MGF 110 7L consists of the sequence of SEQ ID No. 247, 248, 249, 250, 251, 252, 253, 254, 255 or 256.

### MGF 110 8L Gene Sequences

Ken05/Tk1 MGF 110 8L
SEQ ID No. 44
ATGAAGGTGCTGATTCTAGTACTACTGGGGGTCGTTATCCTTCAGGCTGCTCCTATACGTAAATTAGAAGACCTACTGCCAAC
CCGTAATCCTCCCCAAAATGAGCTAGTTTACTGGTGCACCTACGCAAACCAATGTGACTTTTGCTGGGAATGTGTACACGGAA
TCTGCCGAAACAGAATTCAAGCAGATTGGCCTGTGATTCACCAAAATGACTGGATTATAAATTGCACCGTTTCCCGCTGGAAT
GGTATATGTAGGTATTATGAAGGACCCAGAGTCCATATAGATCATGAAATGGACTGTGCAAATCCAACATCCCATACTTATCC
ACACATTGAATACATGAAGATCTATGAAAGAGATGACCTATGA
Kenya 1950 MGF 110 8L
SEQ ID No. 45
ATGAAGGTGCTGATTCTAGTACTACTGGGGGTCGTTATCCTTCAGGCTGCTCCTATACGTAAATTAGAAGACCTACTGCCAAC
CCGTAATCCTCCCCAAAATGAGTTAGTTTATTGGTGCACCTACGCAAACCAATGTGATTTTTGCTGGGAATGTATACACGGAA
TCTGCCGAAACAGAATTCAAGCAGATTGGCCTGTGATTCACCAAAATGACTGGATTATAAATTGCACCGTTTCCCGCTGGAAT
GGTATATGTAGGTATTATGAAGGACCCAGAGGCCATATAGATCATGAAATGGACTGTGCAAATCCAACATACCATACTTATCC
ACACATTGAATACATGAAGATTTATGTAAGAGATGACCTATGA
Malawi Lil-20/1 (1983) MGF 110 8L
SEQ ID No. 46
ATGAAGGTGCTGATTCTAGTACTGCTGGCGGTGGTTATCCTTCAAGCCGCTCCTATACGTAAATTAGAAGATCTACTACCAAC
CCGTTATCCTCCTGACCATGAGCTAGTTTATTGGTGCACCTACGCAAACCAATGTGACTTTTGCTGGGAATGCGTACACGGTA
TCTGCCGAAATAGGATTCAAGCAGATTGGCCGGTTATTCACCAAAATGACTGGATTATAAATTGCACGGTTTCCCGCTGGAAT
GGTATATGTAGTTATTATGAAGGACCCAGAAACCATACAGATCATCAAATGGACTGTGCAAATCCAACATCCCATACCTATCC
ACATAGAGAATACATGAAAATTTATGAAAGAGATGACTTATAA
Mkuzi 1979 MGF 110 8L
SEQ ID No. 47
ATGAAGGTGCTGATTCTAGTACTACTGGGGGGGGGGGGTATTATTCTTCAGGCCGCTCCTATACGTAAATTAGAAGATCTACT
ACCAACCCGTTATCCTCCTGAACATGAGCTGGTTTATTGGTGCACCTACGCAAACCAATGTGACTTTTGCTGGGAATGCGTCC
ACGGTATTTGCCGAAACAGGATTCAAGCAGATTGGCCGGTTATTCATCAAAATGACTGGATTATAAATTGCACGGTTTCCCGC
TGGAATGGCCAATGTCATTATTATGAAGGTTCTCAACAATATCTACATCATGAAATGGACTGTACAAATCCAACATCCCATAC
CTATCCACATACAGAATACATGAAGATCTATGAAAGAGATGACTTATGA
Pretorisuskop/96/4 MGF 110 8L
SEQ ID No. 48
ATGAAGGTGCTAATTCTAGTACTACTGGGGGTGGTTATCCTTCAGGCCGCTCCTATACGTAAATTAGAAGATCTACTACCAAC
CCGTTATCCTCCTGAACATGAGCTAGTTTATTGGTGCACTTACGCAAACCAATGTGACTTTTGCTGGGAATGCGTCCACGGTA
TCTGCCGAAACAGGATTCAAGCAGATTGGCCAGTTATTCATCAAAATGACTGGATTATAAATTGCACGGTTTCCCGCTGGAAT
GGTATATGTAGTTATTATGAAGGACCCAGAAACCATACAGATCATCAAATGGACTGTGCAAATCCAACATCCCATACTTATCC
ACATAGAGAATACATGAAGATCTATGAAAGAGATGACTTATGA
Warmbaths MGF 110 8L
SEQ ID No. 49
ATGAAGGTGCTAATTCTAGTACTACTGGGGGTGGTTATTCTTCAGGCCGCTCCTATACGTAAATTAGAAGATCTACTACCAAC
CCGTTATCCTCCTGAACATGAGCTAGTTTATTGGTGCACTTACGCAAACCAATGTGACTTTTGCTGGGAATGCGTCCACGGTA
TCTGCCGAAACAGGATTCAAGCAGATTGGCCAGTTATTCACCAAAATGACTGGATTATAAATTGCACAGTTTCTCGCTGGAAT
GGTATATGTAGTTATTATGAAGGACCCAGAAACCATACAGATCATCAAATGGACTGTGCAAATCCAACATCCCATACTTATCC
ACATAGAGAATACATGAAGATCTATGAAAGAGATGACTTATGA
Warthog MGF 110 8L
SEQ ID No. 50
ATGAAGGTGCTAATTCTAGTACTACTGGGGGTGGTTATTCTTCAGGCCGCTCCTATACGTAAAGTAGAAAATCTACTGCCAAC
CCGTAATCCTCCCCAAAATGAATTAGTTTATTGGTGCACCTATGCAAACCAATGTGACTTTTGCTGGGAATGCATTCACGGCA
TCTGCCGAAACAGGATTCAAGCAGATTGGCCAGTTATTCATCAAAATGACTGGATTATAAATTGCACGGTTTCCCGCTGGAAT
GGCCAATGTCATTATTATGAAGGTTCTCAACAATATCTGCATCATGAAATGGACTGTATAAATCCAACATCCCATACCTATCC
ACATACAGAATACATGAAGATCTATGAAAGAGATGACTTATGA

[0226] In an embodiment the attenuated ASFV of the invention comprises a functional version of MGF 110 8L. Suitably the functional version of MGF 110 8L comprises the sequence of SEQ ID No. 44, 45, 46, 47, 48, 49 or 50. Suitably the functional version of MGF 110 8L comprises a sequence having at least 70%, at least 80%, at least 90% or at least 95% identity with SEQ ID No. 44, 45, 46, 47, 48, 49 or 50. Suitably the functional version of MGF 110 8L consists of the sequence of SEQ ID No. 44, 45, 46, 47, 48, 49 or 50.

### MGF 110 12L Gene Sequences

Benin 97/1 (genotype I) 7643-7332 MGF 110 12L
SEQ ID No. 276
ATGAAGGTTTTTCTAGGACTTTTACTAGGTTATTCAACCATCCTCATTCTTACATATCAATCACCAACAACCCAGTGGTGTTT
TTATGAAATATCACTTAAAATACTTAATCATCATAGCATGGAAAAATGGAGGGATAAGAATTGGTCAATCATTATAAGGTATT
ATTGTTTTTACCTTGTATTTAGCTTTGCATTTGCTGGTTGCGTTGCATTTGCGATCTGCAAAAATCTACGACTGTGTACAACC
ATGAAATTACTTATGCTTTTGAATATTTTGGTTTTGTTATCTCAGCCAATTTTGAATAATTGA
China/2018/AnhuiXCGQ (genotype II) 14155-13796 MGF 110 12L
SEQ ID No. 277
ATGAAGGTTTTTCTAGGACTTTTACTAGGTTATTCAACCATCCTTATTCTTACCTATCAATCACCAACAACCCCGTGGTGTTT
TTATGAAATATCACTTAAAATACCTAATCATCATAGCATGAAATGTTGTTCGTATCCTAGACTTTATGAACATGAAATGTTCA
TGGAAAAATGGAGGGATAAGAATTGGCCAATCATTATAAGGTATTATTGTTTTTACCTTGTATTTAGCTTTGTATTTGCTGGT
TGCGTTGCATTTGCGATCTGCAAAAATCTACGACTGAGTACAACCATGAAATTACTTATGCTTTTGAGTATTTTGGTTTTGTT
GTTATCTCAGCCAATCTTGAATAATTGA
Georgia 2007/1 (genotype II) 14151-13792 MGF 110 12L
SEQ ID No. 278
ATGAAGGTTTTTCTAGGACTTTTACTAGGTTATTCAACCATCCTTATTCTTACCTATCAATCACCAACAACCCCGTGGTGTTT
TTATGAAATATCACTTAAAATACCTAATCATCATAGCATGAAATGTTGTTCGTATCCTAGACTTTATGAACATGAAATGTTCA
TGGAAAAATGGAGGGATAAGAATTGGCCAATCATTATAAGGTATTATTGTTTTTACCTTGTATTTAGCTTTGTATTTGCTGGT
TGCGTTGCATTTGCGATCTGCAAAAATCTACGACTGAGTACAACCATGAAATTACTTATGCTTTTGAGTATTTTGGTTTTGTT
GTTATCTCAGCCAATCTTGAATAATTGA
Ken05/Tk1 (genotype IX) 15456-14950 MGF 110 12L
SEQ ID No. 279
ATGAAGGTTTTTCTAGGACTTTTACTAGGTTTTTCAATCATCCTCATTCTTACATATCAATCACCGACAACTCAGCATCCTCC
TAAGGAAGAGCTTGCGTACTGGTGCACTTATGCAAAATCTTGTGACTTCTGCTGGGATTGCCAAAATGACACTTGTATAAATA
AGGTAATAAATGAGTCTATTTCGATAACTTCGATTGTAAACTGTAGAGTTACTCGCGATTCCCAATCCTGTTTTTATGAAATA
TCAGTTAAAATACCTAATCATCATAGCATGGAATGTTCATATCCTAGACTTTATGAACATGAAATGTTTATGGAAAAATGGAG
GGATGAGTATTGGCCAATCATTATAAAACAGTGTTGTTTTTACCTTGTATTTAGCATTGCATTTGCTGGATGCGTTGCATTTG
CGATCTGCAAAAATCTACGACTGCGTACAACTATAAAACTACTTATTCTTTTGAGTATTTTGGTTTGGTTGTCTCAACCAGTC
TTGAATTGA
Ken06.Bus (genotype X) 11961-11446 MGF 110 12L
SEQ ID No. 280
ATGAAGGTTTTTCTGGCACTTTTACTAGGTTATTTAACTATCCTCATTCTTACATATCAAACACCAACAACCCAGCATCCTCC
TAAGGAGGAGCTTCCATATTGGTGTACGTATGTAAAGAATTGCGACCTCTGTTGGGATTGTCAAGATAGCATCTATTGGAACA
AGGTAATAAGTGAGTCTATTTCGATAAATTCGATTATAAACTGTAGAGTTACTTGCGATTCCCAATCTCAGTCCTGCTTTTAT
GAAATATTACTTAAAATACCTAATCATCATAGCATGGAATGTTCTTATCCTGGATCGTATGAAAATGAAATGTTCATGGAAAA
ATGGAGGGATGAGAATTGGTCAATCATTATAAAACATTATTGTTTTTACCTTGTATTTAGCTTTGCATTTGCTGGTTGCGTTG
CATTTGCGATCTGCAAAAATCTACGACTGAGTACAACTATGAAATTACTTATGCTTTTGAGTATTTTGGTTTGCTTATCTCAG
CCAATCTTGAATAATTGA
Kenya 1950 (genotype X) 16240-15731 MGF 110 12L
SEQ ID No. 281
ATGAAGGTTTTTCTAGGACTTTTACTAGGTTTTTCAATCATCCTCATTCTTACATATCAATCACCGACAACCCAGCATCCTCC
TAAGGAAGAGCTTGCGTACTGGTGCACTTATGCAAAATCTTGTGACTTCTGCTGGGATTGCCAAAATGACACTTGTATAAATA
AGGTAATAAATGAGTCTATTTCGATAACTTCGATTGTAAACTGTAGAGTTACTCGCGATTCCCAGTCCTGTTTTTATGATATA
TCAGTTAAAATACCTAATCATCATAGCATGGAATGTTCATATCCTAGACTTTATGAACATGAAATGTTTATGGAAAAATGGAG
GGATGAGTATTGGCCAATCATTATAAAACAGTGTTGTTTTTACCTTGTATTTAGCTTTGCATTTGCTGGTTGCGTTGCATTTG
CGATCTGCAAAAACCTACGACTGCGTACAACTATAAAACTACTTATTCTTTTGAGTATTTTGGTTTGGTTATCTCAGCCAATC
TTGAATAATTGA
L60 (genotype I) 7993-7682 MGF 110 12L
SEQ ID No. 282
ATGAAGGTTTTTCTAGGACTTTTACTAGGTTATTCAACCATCCTCATTCTTACATATCAATCACCAACAACCCAGTGGTGTTT
TTATGAAATATCACTTAAAATACTTAATCATCATAGCATGGAAAAATGGAGGGATAAGAATTGGTCAATCATTATAAGGTATT
ATTGTTTTTACCTTGTATTTAGCTTTGCATTTGCTGGTTGCGTTGCATTTGCGATCTGCAAAAATCTACGACTGTGTACAACC
ATGAAATTACTTATGCTTTTGAATATTTTGGTTTTGTTATCTCAGCCAATTTTGAATAATTGA
Malawi Lil-20/1/1983 (genotype VIII) 12584-12069 MGF 110 12L
SEQ ID No. 283
ATGAAGGTTTTTCTAGGACTTTTACTAGGTTATTCAACCATCCTCATTCTTACATATCAATCACCAACAACCCAGCATCCTCC
TAAGGAAGAGCTTGAGTATTGGTGCACTTATGCAAAAACTTGTGACTTCTGCTGGGATTGCCAAAATGACACTTGTATAAATA
AGGTAATAAATGAATCTATTTCGATGAATTCGATTGTAAACTGTAGAGTTACTCGCGATTCCCAATCCCAGTCCTGTTTTTAT
GAAATATCACTTAAAATACCTAATTATCATAGCATGGAATGTTCATATCCTAGACTTTATAAACATTTCATGTCCATGGAAAA
ATGGAGGGATGAGAATTGGCCAATCCTTATAAGACATTATTGTTTTTACCTTGTATTTAGCTTTGCATTTGCTGGTTGCGTTG
CATTTGCGATCTGCAAAAATCTACGACTGCGTACAACCATGAAATTACTTATGCTTTTGAGTATTTTGGTTTTGTTATCTCAG
CCAATCTTGAATAATTGA
Mkuzi 1979 (genotype XII) 15894-15571 MGF 110 12L
SEQ ID No. 284
ATGAACGCAACCATGAAGGTTTTTCTAGGACTTTTACTAGGTTATTCAACCATCCTCATTCTTACATATCAATCACCGACAAC
CCAGTGGTGTTTTTATGAAATATCACTTAAAATACTTAATCATCATAGCATGGAAAAATGGAGGGATAAGAATTGGTCAATCA
TTATAAGGTATTATTGTTTTTACCTTGTGTTTAGCTTTGCATTTGCCGGTTGCGTTGCATTTGCGATCTGCAAAAATCTACGA
CTGTGTACAACCATGAAATTACTTATGCTTTTGGGTATTTTGGTTTTGTTATCTCAGCCAATCTTGAATAATTGA
Warmbaths (genotype III/l) 14212-13859 MGF 110 12L
SEQ ID No. 285
ATGAAGGTTTTTCTAGGACTTTTACTAGGTTATTCAACCATCCTCATTCTTACATATCAATCACCAGCAACCCAGTGGTGTTT
TTATGAAATATCACTTAAAATACCTAATCATCATAGCATGGAATGTTCATATCCTAGACTTTATAAACATTTCATATTCATGG
AAAAATGGAGGGATAAGAATTGGTCAATCATTATAAGGTATTATTGTTTTTACCTTGTATTTAGTTTTGCATTTGCTGGTTGC
ATTGCATTTGCGATCTGCAAAAATCTACGACTGTGTACAACTATGAAATTACTTATGCTTTTGAGTATTTTGGTTTTGTTATC
TCAGCCAATCTTGAATAATTGA
Warthog (genotype IV) 12897-12544 MGF 110 12L
SEQ ID No. 286
ATGAAGGTTTTTCTAGGACTTTTACTAGGTTATTCAACCATCCTCATTCTTACATATCAATCACCAGCAACCCAGTGGTGTTT
TTATGAAATATCACTTAAAATACCTAATCATCATAGCATGGAATGCTCATATCCTAGACTTTATAAACATTTCATGTTCATGA
AAAAATGGAGGGATAAGAATTGGTCAATCATTATAAGGTATTATTGTTTTTACCTTGTATTTAGTTTTGCATTTGCTGGTTGC
ATTGCATTTGCGATCTGCAAAAATCTACGACTGTGTACAACTATGAAATTACTTATGCTTTTGAGTATTTTGGTTTTGTTATC
TCAGCCAATCTTGAATAATTGA

[0228] In an embodiment the attenuated ASFV of the invention comprises a functional version of MGF 110 12L. Suitably the functional version of MGF 110 8L comprises the sequence of SEQ ID No. 276, 277, 278, 279, 280, 281, 282, 283, 284, 285 or 286. Suitably the functional version of MGF 110 12L comprises a sequence having at least 70%, at least 80%, at least 90% or at least 95% identity with SEQ ID No. 276, 277, 278, 279, 280, 281, 282, 283, 284, 285 or 286. Suitably the functional version of MGF 110 12L consists of the sequence of SEQ ID No. 276, 277, 278, 279, 280, 281, 282, 283, 284, 285 or 286.

### MGF 360 6L Gene Sequences

Georgia 2007/1 MGF 360 6L (NC_044959.1:17222-18349)
SEQ ID No. 51
TTACCGCAAATTGTCTCTCAGCGAAGAAAATGAATGAAACGTTTCTGTATATTCATAGGTTGAAATTATTTTACGCACTTCAC
TAGGTTCTAATATTTTCTTATGAAGTATTGAATGGGGGCTTAAAAGTCCTTTCTTAAAAAGAAGTTTCATCATAACATTCTTT
TCTTGTCTAAGAAGAGTTTCTTGTATTTTTTTTGTATAAGGATTGGCACCCAAACTTATACAAAAATGTACATTACTCCAAAT
ACCATAATTTGAAAAGAAAGTTATTTCCCTATTTACTTCATGATTAATGAAACCTATCAACGTCTCTAAGGCCGTATTGATAT
TTGCGCCTAAGGCAAAACAATAGTATATACCCAATTTATTTTGAGGGTACATACAAGCAAGCGACATCATGTCATTTGGATCT
AAACGTATATTTTCCTGAAAATATGCATGATGGATTTCATCAACATTACCTAAGTATACAGCCGTTTTTAAACGCCAATAATC
TAGGTGAGGAAATTTCTTACTAAGAAAACGAATAGGTTTTATAAGATTAAACTCTATGGCGATCTTAAACCAAAATTTTAATA
CATATGTATTTTTTATCATTTTTTCTTTTTCATCTAAATTTAAGATAAAACGATTGTAAATAAAGTCTATCAACACGTAAAAA
TCATGGCTATCAAAACTGTCGAGAATCGAAATATTGTCATAATAAATATCTATAGCTAATAAGACCTTTTGTTGTTTAATTAG
ATCAACAAACATATTATACAACCCTACATCTAAAAATTTTGGATCAGCTCCTAGTTGAATACACAGAACTTTCGTCCTTTCCG
TCTTGGCACATATGATGCCATAATTAATGTTGGCACCCCATAAAACAAATAACTTGATTAGATCAGTCTGGTTTTTCTTCACA
GCCCTCACCAAGGCTCTGTCAAGCTCATAGCTGTCAACATCAGAACATGACATAGAGCCACTGGTTACCATTTTACATTGTTT
ACAAAAACCTATGGGTCCGTTTTCCCACCATAATCCAAGCTGCTGTAAAATAAAAATATCATCCTCATGATAATTTGAAAAAG
CCTTGTTTTCTATCAAGACTTTTTTTGTAAGAACCTGTAAAGAATTCAT
China/2018/AnhuiXCGQ MGF 360 6L (MK128995.1:17221-18348)
SEQ ID No. 52
TTACCGCAAATTGTCTCTCAGCGAAGAAAATGAATGAAACGTTTCTGTATATTCATAGGTTGAAATTATTTTACGCACTTCAC
TAGGTTCTAATATTTTCTTATGAAGTATTGAATGGGGGCTTAAAAGTCCTTTCTTAAAAAGAAGTTTCATCATAACATTCTTT
TCTTGTCTAAGAAGAGTTTCTTGTATTTTTTTTGTATAAGGATTGGCACCCAAACTTATACAAAAATGTACATTACTCCAAAT
ACCATAATTTGAAAAGAAAGTTATTTCCCTATTTACTTCATGATTAATGAAACCTATCAACGTCTCTAAGGCCGTATTGATAT
TTGCGCCTAAGGCAAAACAATAGTATATACCCAATTTATTTTGAGGGTACATACAAGCAAGCGACATCATGTCATTTGGATCT
AAACGTATATTTTCCTGAAAATATGCATGATGGATTTCATCAACATTACCTAAGTATACAGCCGTTTTTAAACGCCAATAATC
TAGGTGAGGAAATTTCTTACTAAGAAAACGAATAGGTTTTATAAGATTAAACTCTATGGCGATCTTAAACCAAAATTTTAATA
CATATGTATTTTTTATCATTTTTTCTTTTTCATCTAAATTTAAGATAAAACGATTGTAAATAAAGTCTATCAACACGTAAAAA
TCATGGCTATCAAAACTGTCGAGAATCGAAATATTGTCATAATAAATATCTATAGCTAATAAGACCTTTTGTTGTTTAATTAG
ATCAACAAACATATTATACAACCCTACATCTAAAAATTTTGGATCAGCTCCTAGTTGAATACACAGAACTTTCGTCCTTTCCG
TCTTGGCACATATGATGCCATAATTAATGTTGGCACCCCATAAAACAAATAACTTGATTAGATCAGTCTGGTTTTTCTTCACA
GCCCTCACCAAGGCTCTGTCAAGCTCATAGCTGTCAACATCAGAACATGACATAGAGCCACTGGTTACCATTTTACATTGTTT
ACAAAAACCTATGGGTCCGTTTTCCCACCATAATCCAAGCTGCTGTAAAATAAAAATATCATCCTCATGATAATTTGAAAAAG
CCTTGTTTTCTATCAAGACTTTTTTTGTAAGAACCTGTAAAGAATTCAT
Warmbaths MGF 360 6L (AY261365.1:17236-18363
SEQ ID No. 53
TTACCGCAAATTGTCTCTCAGTAAAGAAAATGAATGAAACGTTTCTGTATATTCATAGGTTGAAATTATTTTACGCACTTCAC
CAGGTTCTAATATTTTTTTATGAAGTATTGAATGGGGGCTTAAAAGTCCTTTCTTAAAAAGAAGTTTCATTATAACATTCTTT
TCTTGTCTAAGAAGAGTTTCTTGTATTTTTTTTGTATAAGGATTGGCACCCAAACTTATACAAAAATGTACATTACTCCAAAT
ACCATAATTTGAAAAGAAAGTTATTTCCCTATTTACTTCATGATTAATGAAACCTATCAACGTCTCTAAGGCAGTATTGATAT
TTGCACCTAAGGCAAAACAATAGTATATACCTAATTTATTCTGAGGGTACATACAAGCAAGCGGCATCATGTCATTTGGATCT
AAACGTATATTTTCCTGAAAATATGCATGATGGATTTCATCAACATTACCTAAGTATACAGCCGTTTTTAAACGCCAATAATC
TAGGTAAGGAAATTTCTTACTAAGAAAACGAATAGGTTTTATAAGATTAAACTCTATGGCGATCTTAAACCAAAATTTTAATA
CATATGTATTTTTTATCATTTTTTCTTTTTCATCTAAATTTAAGATAAAACAATTGTAAATAAAGTCTATCAACACGTAAAAA
TCATGGCTATCAAACCTGTCGAGAATCGAAATATTATCATAATAAATATCTATAGCTAATAAGACCTTTTGTTGTTTAATTAG
ATCAACAAACATATTATACAACCCTACATCTAAAAATTTTGGATCAGCTCCTAGTTGAATACACAGAGCTTTCATCCTTTCTG
TCTTGGCGCATATGATGCCATAATTAATGTTGGCACCCCATAAAACAAATAACTTGATTAGATCAGTCTGGTTTTTCTTCACA
GCCCTCACCAAGGCTCTGTCAAGCTCATAGCTGTCAACGTCAGAGCATGACATAGCGCCACTAGTTACCATTTTACATTGTTT
ACAAAAACCTATGGGACCGTTTTCCCACCATAGTCCAAGCTGCTGTAAAATAAAAATATCATCTTCATGATATTTTGAAAAAG
CCTTGTTTTCTATCAAGACTTTTTTTGTAAGAACCTGTAAAGAATTCAT
L60 MGF 360 6L (NC_044941.1:11041-12168)
SEQ ID No. 54
TTACCGCAAATTGTCTCTCAGCAAAGAAAATGAATGAAACGTTTCCGTATATTCATAGGTTGAAATTATTTTACGCACTTCAC
TAGGTTCTAATATTTTCTTATGAAGTATTGAATGGGGGCTTAAAAGTCCTTTCTTAAAAAGAAGTTTCATTATAACATTCTTT
TCTTGTCTAAGAAGAGTTTCTTGTATTTTTTTTGTATAAGGATTGGCACCCAAACTTATACAAAAATGTACATTACTCCAAAT
ACCATAATTTGAAAAGAAAGTTATTTCCCTATTTACTTCATGATTAATGAAACCTATCAACGTCTCTAAGGCAGTATTGATAT
TTGCGCCTAAGGCAAAACAATAGTATATACCTAATTTATTCTGAGGGTACATACAAGCAAGCGACATCATGTCATTTGGATCT
AAACGTATATTTTCCTGAAAATATGCATGATGGATTTCATCAACATTACCTAAGTATACAGCCGTTTTTAAACGCCAATAATC
TAGATGAGGAAATTTCTTACTAAGAAAACGAATAGGTTTTATAAGATTAAACTCTATGGCGATCTTAAACCAAAATTTTAATA
CATATGTATTTTTTATCATTTTTTCTTTTTCATCTAAATTTAAGATAAAACAATTGTAAATAAAGTCTATCAATACGTAAAAA
TCATGGCTATCAAAACTGTCGAGAATCGAAATATTATCATAATAAATATCTATAGCTAATAAGACCTTTTGTTGTTTAATTAG
ATCAACAAACATATTATACAATCCTACATCTAAAAATTCTGGATTGGCTCCTAGTTCAATACACAGGTCTTTCGTCCTTTCCG
TCTTGGCACATATGATGCCATAATTAATGTTGGCACCCCATAAAACAAACAACTTGATTAGATCAGTCTGGTTTTTCTTCACA
GCCCTTACCAAGGCTCTGTCAAGCTCATAGCTGTCAACGTCAGAGCATGACATAGAGCCACTGGTTACCATTTTACATTGTTT
ACAAAAACCTATGGGGCCATTATGCCACCACAATCCAAGCTGCTGTAAAATAAAAATATCATCCTCATGATATTCTGAAAAAG
CCTTGTTTTCTATCAAGACTTTTTTTGTAAGAACCTGTAAAGAATTCAT
Benin 97/1 MGF 360 6L (NC_044956.1:10692-11819)
SEQ ID No. 55
TTACCGCAAATTGTCTCTCAGCAAAGAAAATGAATGAAACGTTTCCGTATATTCATAGGTTGAAATTATTTTACGCACTTCAC
TAGGTTCTAATATTTTCTTATGAAGTATTGAATGGGGGCTTAAAAGTCCTTTCTTAAAAAGAAGTTTCATTATAACATTCTTT
TCTTGTCTAAGAAGAGTTTCTTGTATTTTTTTTGTATAAGGATTGGCACCCAAACTTATACAAAAATGTACATTACTCCAAAT
ACCATAATTTGAAAAGAAAGTTATTTCCCTATTTACTTCATGATTAATGAAACCTATCAACGTCTCTAAGGCAGTATTGATAT
TTGCGCCTAAGGCAAAACAATAGTATATACCTAATTTATTCTGAGGGTACATACAAGCAAGCGACATCATGTCATTTGGATCT
AAACGTATATTTTCCTGAAAATATGCATGATGGATTTCATCAACATTACCTAAGTATACAGCCGTTTTTAAACGCCAATAATC
TAGATGAGGAAATTTCTTACTAAGAAAACGAATAGGTTTTATAAGATTAAACTCTATGGCGATCTTAAACCAAAATTTTAATA
CATATGTATTTTTTATCATTTTTTCTTTTTCATCTAAATTTAAGATAAAACAATTGTAAATAAAGTCTATCAATACGTAAAAA
TCATGGCTATCAAAACTGTCGAGAATCGAAATATTATCATAATAAATATCTATAGCTAATAAGACCTTTTGTTGTTTAATTAG
ATCAACAAACATATTATACAATCCTACATCTAAAAATTCTGGATTGGCTCCTAGTTCAATACACAGGTCTTTCGTCCTTTCCG
TCTTGGCACATATGATGCCATAATTAATGTTGGCACCCCATAAAACAAACAACTTGATTAGATCAGTCTGGTTTTTCTTCACA
GCCCTTACCAAGGCTCTGTCAAGCTCATAGCTGTCAACGTCAGAGCATGACATAGAGCCACTGGTTACCATTTTACATTGTTT
ACAAAAACCTATGGGGCCATTATGCCACCACAATCCAAGCTGCTGTAAAATAAAAATATCATCCTCATGATATTCTGAAAAAG
CCTTGTTTTCTATCAAGACTTTTTTTGTAAGAACCTGTAAAGAATTCAT
Pretorisuskop/96/4 MGF 360 6L (AY261363.1:17123-18250)
SEQ ID No. 56
TTACCGCAAATTGTCTCTCAGCAAAGAAAATGAATGAAACGTTTCCGTATATTCGTAGGTTGAAATTATTTTACGCACTTCAC
TAGGTTCTAATATTTTCTTATGAAGTATTGAATGGGGGCTTAAAAGTCCTTTCCTAAAAAGAAGTTTCATTATAACATTCTTT
TCTTGTCTAAGAAGAGTTTCTTGTATTTTTTTTGTATAAGGATTGGCACCCAAACTTATACAAAAATGTACATTACTCCAAAT
ACCATAATTTGAAAAGAAAGTTATTTCCCCATTTACTTCATGATTAATGTAACGTATCAATGTCTCTAAGGCAGTATTGATAT
TTGCGCCTAAGGCAAAACAATAGTATATACCTAATTTATTCTGAGGGTACATACAAGCAAGCGGCATCATGTCATTTGGATCT
AAACGTATATTTTCCTGAAAATATGCATGATGGATTTCATCAACATTACCTAAGTATACAGCCGTTTTTAAACGCCAATCATC
TAGGTGAGGAAATTTCTTACTAAGAAAACGAATAGGTTTTATAAGATTAAACTCTATGGCGATCTTAAACCAAAATTTTAATA
CATATGTATTTTTTATCATTTTTTCTTTTTCATCTAAATTTAAGATAAAACAATTGTAAATAAAGTCTATCAACACGTAAAAA
TCATGACTATCAAACCTGTCGAGAATCGAAATATTATCATAATAAATATCTATAGCTAATAAGACCTTTTGTTGTTTAATTAG
ATCAACAAACAAATTATACAACCCTACATCTAAAAATTTTGGATCAGCTCCTAGTTGGATACATAGAACTTTCGTCCTTTCCG
TCTTGGCACATATGATGCCATAATTAATGTTGGCACCCCATAAAACAAATAACTTGATTAGATCAGTCTGGTTTTTCTTCACA
GCCCTCACCAAGGCTCTGTCAAGCTCATAGCTGTCAACGTCAGAGCATGACATAGAGCCACTGGTTACCATTTTACATTGTTT
ACAAAAACCTATGGGGCCATTATGCCACCATAGTCCAAGCTGCTGTAAAATAAAAATATCATCTTCATGATAATTTGAAAAAG
CCTTGTTTTCTATCAAGACTTTTTTTGTAAGAACCTGTAAAGAATTCAT
Mkuzi 1979 MGF 360 6L (AY261362.1:18925-20052)
SEQ ID No. 57
TTACTGCAAATTGTCTCTCAGCAAAGAAAATGAATGAAACGTTTCTGTATATTCATAGGTTGAAATTATTTTACGCACTTCAT
TAGGTTCTATTATTTTCTTATGAAGTATTGAATGGGGGCTTAAAAGTCCTTTCTTAAAAAGAAGTTTCATTATAACATTCTTT
TCTTGTCTAAGAAGAGTTTCTTGTATTTTTTTTGTATAAGGATTGGCACCCAAACTTATACAAAAATGTACATTACTCCAAAT
ACCATAATTTGAAAAGAAAGTTATTTCCCTATTTCCTTCATGATTAATGAAACCTATCAACGTCTCTAAGGCAGTATTGATAT
TTGCGCCTAAGGCAAAACAATAGTATATACCTAATTTATTCTGAGGGTACATACAAGCAAGCGACATCATGTCATTTGGATCT
AAACGTATATTTTCTTGAAAATATGCATGATGGATTTCATCAACATTACCTAAGTATACAGCCGTTTTTAAACGCCAATCATC
TAGGTGAGGAAATTTCTTACTAAGAAAACGAATAGGTTTTATAAGATTAAACTGTATGGCGAACTTAAACCAAAATTTTAATA
CAAGTGTATTTTTTGTCATTTCTTCTTTTTCATCTAAGTATAGGATAAAACGATTGTACATAAAGTCTATCAACACGTAAAAA
TCATGGCTATCAAAACTGTCGAGAATCGAAACATTATCATAATAAATATCTATAGCTAATAAGACCTTTTGTTGTTTAAGTAG
ATCAACAAACATATTATACAACCCTACATCTAAAAATTTTGGATCAGCTCCTAGTTGAATACACAGAACTTTCGTCCTTTCCG
TCTTGGCACATATGATGCCATAATTAATGTTGGCACCCCATAAAATAAATAACTTGATTAGATCAGTCTGGTTTTTCTTCACA
GCCCTCACCAAGGCTCTGTCAAGCTCATAGCTGTCAACGTCAGAGCATGACATAGAGCCACTGGTTACCATTTTACATTGTTT
ACAAAAACCTATGGGGCCATTATGCCACCATAGTCCAAGCTGCTGTAAAATAAAAATATCATCTTCATGATATTCTGAAAAAG
CCTTGTTTTCTATCAAGACTTTTTTTGTAAGAACCTGTAAAGAATTCAT
Ken05/Tk1 MGF 360 6L (NC_044945.1:19166-20293)
SEQ ID No. 58
TTATCGTAAATTGTCTCTTAGCGAAGAAAATGAATGAACCGTTTCCGTATATTGATAGGTTGAAATTATTTTACGCACTTCAC
TAGGTTCTAATATTTTCTTATGAAGTATTGAATGGGGGCTTAAAAGTCCTTTCTTAAAAAGTAGTTTCATTATAACATTCTTT
TCTTCTCTAAGAAGAGTTTCTTGTATTTTTTTTGTATAAGGATTGGCACCCAAACTTATACAAAAATGTACATTACTCCAAAT
ACCATAATTTGAAAAGAAAGTTATTTCCCTATTTACTTCATGATTAATGAAACGTATCAACGTCTCTAAGGCAGTATTGATAT
TTGCCCCTAAGGCAAAACAATAGTATATACCTAACTTATTTTGAGGGTACATACAAGCAAGCGACATCATGTTATTTGGATCT
AAACGTATATTTTCCTGAAAATATGCATGATGGATTTCATCAACATTACCTAAGTATACAGCCGTTTTTAAACGCCAATGATC
TAGGTGAGGAAATTTCTTACTAAGAAAACGAATAGGTTTTATAAGATTAAACTCTATCGCGAACTTATACCAAAATTTTAATA
CAAGTGTATTTCTTGTCATTTCTTCTTTTTCATCTAAATTTAAGATAAAACGATTGTAAATAAAGTCTATCAACGTGTAAAAA
TCATGGTCATCAAAACTATCGAGAATCGAAATATTATCATAATAAATATCTATAGCTAATAAGACTTTTTGTTGTTTAAGTAG
ATCAACAAACATATTATACAACCCTACATCTAAAAATTTTGGATCAGCTCCTAGTTGAAGACACAGAACTTTTGTCCTTTCCG
TCTTGGCACACATAATGCCATAATTAACGTTGGCACCCCATAAAACAAATAACTTGATTAGATCAGTCTGGTTTTTCTTCACA
GCCGTCACCAAGGCTCTGTCAAGCTCATAGCTGTCAACATCAGAGCATGACATAGAGCCACTGGTTACCATTTTACATTGTTT
ACAAAAACCTATGGGGCCATCATGCCACCACAACCCTAGCTGCTGTAAAATAAAAATATCATCCTCATGATAATTTGAAAAGG
CCTTGGTTTCTATCAAGACTTTTTTTGTAAGAACCTGTAAAGAATTCAT
Malawi Lil-20/1 (1983) MGF 360 6L (AY261361.1:15478-16605)
SEQ ID No. 59
TTACCGCAAATTGTCTCTCAGCGAAGAAAATGAATGAAACGTTTCCGTATATTCATAGGTTGAAATTATTTTACGCACTTCAC
CAGGTTCTAATATTTTTTTATGAAGTATTGAATGGGAGGTTAAAAGTCCTTTCTTAAAAAAGAGTTTCATTATAACATTCTTT
TCTTCTCTAAGAAGAGTTTCTTGTATTTTTTTTATATAAGGATTGGCACCCAAACTTATACAAAAATGTACATTACTCCAAAT
ACCATAATTTGAAAAGAAAGTTATTTCCCTATCTACTTCATGATTAATGAAACGTATCAACGTCTCTAAGGCAGTATTGATAT
TTGCACCTAAGGCAAAACAATAGTATATACCTAATTTATTTTGAGGGTACATACAAGCAAGCGACATCATGTGATTTGGATCT
AAACGTATATTTTCCTGAAAATATGCATGATGGATTTCATCAACATTACCTAAGTATACAGCCATTTTTAAACGCCAATCATC
TAGGTGAGGAAATTTCTTACTAAGAAAACGAATAGGTTTTATAAGATTAAACTCTATGGCGATCTTAAACCAAAATTTTAATA
CAAGTGTATTTCTTGTCATTTCTTCTTTTTCATCTAAGTATAGGATATAACGATTGTAAATAAAGTTTATCAATGCGTAAAAA
TCATGGCTATCAAAACTGTCGAGAATGGGAATGTTTTCATAATAAATATCTATAGCTAATAAGACCTTTTGTTGTTTAAATAG
ATCAACAAACATAGTATACAACCCTACCTCTAAAAATGTTGGATCAGCTCCTAGTTGAATACACAGAACTTTCGTCCTTTCCA
TCTTGGCACATATGATGCCATAATTGATGTTGGCACCCCATAAAACAAATAACTTGATTAGATCAGTCTGATTTTTCTTTACA
GCCTTCACCAAGGCTCTGTCAAGCTCATAGCTGTCAACGTCAGAGCATGACATAGAGCCACTGGTTACCATTTTACATTGTTT
ACAAAAACCTATAGGTCCGTTTTCCCACCATAATTCTAGCTGCTGTAAAATAAAAACATCATCTTCATGATAATTTGAAAAAG
CCTTGTTTTCTATCAAGACTTTTTTTGTAAGAACCTGTAAAGAATTCAT
Kenya 1950 MGF 360 6L (AY261360.1:19341-20462)
SEQ ID No. 60
TTACCGCACATTGTCTCTCAGCGAAGAAAATGAATGAAACGTTTCCGTATATTGATAGGTTGAAATTATTTTACGCACTTCAC
TAGGTTCTAATATTTTCTTATGAAGTATTGAATGGGGGCTTAAAAGTCCTTTCTTAAAAAGTAGTTTCATTATATCATACTTT
TCTTCTCTAAGAAGAATTTCTTGTATTTTTTTTGTATAAGGATTGGCACCCAAACTTATACAAAAATGTACATTACTCCAAAT
ACCATAATTTGAAAAGAAAGGTCTATTTAGTTCATGATTAATGAAACGTATCAACGCCTCTAAGGCAGTATTGATATTTGCCC
CTAAGGCAAAACAATAGTATATACCTAATTTATTCTGAGGATACATACAAGCAAGCGACATCATGTGATTTGGATCTAAACGT
ATATTTTCCTGAAAATATGCATGATGGATTTCATCAACATTCCCTAAGTATACAGCCGTTTTTAAACGCCAATCATCTAGGTG
AGGAAATTTCTTACCAAGAAAACGAATAGGTTTTACAAGATTAAACTCTATGGCAAACTTATACCAAAATTTTAATACAAGTG
TATTTTTTGTTATTTTTTCTTTTTCATCTAAATTTAAGATAAAACCATTGTAAATAAAGTCTATCAACACGTAAAAATCATGG
CTATCAAAACTGTCGAGAATCGAAATATTATCATAATAAATATCTATAGCTAATAAGACCTTTTGTTGTTTAATTAGATCAAC
AAACATATTATACAACCCTACATCTAAAAATTTTGGATCAGCTCCTAGTTGAATACATAGAACTTTCGTCCTTTCCGTCTTGG
CACACACGATGCCAAAATTAATTTCGGCGCCCCATAAAACAAATAACTTGATTAGATCAGTTTGGTTTTCCTTCACAGCTTTT
ACTAAGGCTCTGTCAAGCTCATAGCTGTCGACATCAGAACATGACATAGAGCCACCGGTTACCATTTTACATTGTTTACAAAA
ACCTATGGGTCCGTTTTCCCACCACAGTCCAAGCTGCTGTAAAATGAAACTATCATCTTCATGATAATTTGAAAAAGCCTTGT
TTTCTATCAAGACTTTTTTTGTAAGAACCTGTAAAGAGTTCAT
Ken06.Bus MGF 360 6L (NC_044946.1:15081-16208)
SEQ ID No. 61
TTACCGCAAATTATCTCTCAGTGAAGAAAATGAATGAAACGTTTCCGTATGTTCATAGGTTGAAATTATTTTACGCACCTCAC
TAGGTTCTAATATTTTTTTATGAAGTATTGAATGGGGGCTTAAAAGTCCTTTTTTAAAAAGTAGTTTCATTATAACATTCTTT
TCTTCTCTAAGAAGAGTTTCTTGTATTTTTTTTGTATCAGGGTTGGCACCCAAACTTATACAAAAATGTATATTACTCCAAAT
ACCATAATTTGAAAAGAAAGTTATTTCCCTATTTACTTCATGATTAATGAAACGTATCAACGTCTCTAAGGCAGTATTGATAT
TTGCGCCTAAGGCAAAACAATAGTATATACCTAATTTATTCTGAGGGTACATACAAGCAAACGACATCATGTGATTTGGATCT
AAACGTATATTTTCTTGAAAATATGCATGATGGATTTCATCAACATTCCCTAAGTATACAGCCGTTTTTAAACGCCAATCATC
TAGGTGAGGAAATTTCTTACTAAGATAACGGATAGGTTTTACAAGATTAAACTCTATGGCGAACTTAAACCAAAATTTTAATA
CAAATGTGTTTCTTGTCATTTTTTCTTTTTCATCTAAATTTAGGATAAAACGATTGTAAATAAAGTTTATCAACGCGTGAAAA
TCATGGCTATTAAAGCTGTCGAGAATCAAAATATTATCATAATAAATATCTATGGCTAATAAGACCTTTTGTTGTTTAATTAG
ATTAACAAACATATTATACAGCTTTTTATCTAAAAATTCTGGATCGGCTCCTAGTTGAATACACAGGTCTTTCGTCCTTTCCA
TCTTAGCACACATAATGCCATAATTAATGTTGGCACCCCATAAAACAAATAATATGATTAGATCAGTTTGGTTTTCCTTCACA
GCTTTTACTAAGGCCCTGTCAAGCTCATAGCTGTCAACATCAGAGCATGACATTGAGCCAATGGTTACTATTTTACATTGTTT
ACAAAAACCTATGGGGCCGTTTTCCCACCACAATCCTAGCTGCTGTAAAATAAAACTATCATCTTCATGATAATTTGAAAAGG
CCTTGTTTTCTATTAAGACTTTTTTTGTAAGAACCTGTAAAGAATTCAT

[0230] In an embodiment the attenuated ASFV of the invention comprises a functional version of MGF 360 6L. Suitably the functional version of MGF 360 6L comprises the sequence of SEQ ID No. 51, 52, 53, 54, 55, 56, 57, 58, 59, 60 or 61. Suitably the functional version of MGF 360 6L comprises a sequence having at least 70%, at least 80%, at least 90% or at least 95% identity with SEQ ID No. 51, 52, 53, 54, 55, 56, 57, 58, 59, 60 or 61. Suitably the functional version of MGF 360 6L consists of the sequence of SEQ ID No. 51, 52, 53, 54, 55, 56, 57, 58, 59, 60 or 61.

### MGF 360 10L Gene Sequences

Georgia 2007/1 MGF 360 10L (LR743116.1:26373-27410)
SEQ ID No. 62
CTAGGCCAACATACTTTTTAATTTATAGTTTTTTAATAGATGATATATTTTGTTAGGATCTGCTTCTTTTAACGTTAATAGCG
AGGAGTCTGCACTATAAATGTCTAATGATAAATGATGAGATATCAAATAGTAATTCCGTTGCTCTGCTAGGGCCTTTGCCTCT
TCAAAGGCGTCGGCTCCCAGATCTATACAAAAGAACAAGTTATCCATATTATAAAATCGTACGCAGGCAAGCATAGCTGAATT
AATATTAGCTCCTAAGAGAAAACAATAATATATGGTTAAAAAATTGTTATCTTTTGTGCAGGCCATCCGCATCATTTCATCCA
CGTCCATGCGGATCTTTTCCTTTTCATACAAATTATGTAGGTCAAACAGCTTATTAAAACAAAGAGCACAGATTAACCACCAC
GTATTTAGATACTTAAAATGTTGGTAAACATAAGAAATGGCCTCCCTAAGATTATCCTGCAATGCCACTATAAAACAGTATAT
CGTTAACATATCACCATCCGACATATTACTTAATATGTCGGTGTCTTCTACTAACCTTTTCAACTTCCAATATATGGATGACC
TTATTTCCCTTATAATGACATAGGCTGGAAAGGGATTATCATTAAAAAGTTTAAGACATAAGATAATATTACTGCTAGTAGTG
CCAGGGTGTATTAATTTAAAGAACATGTGCATAATCTTCTTTTTATCCACGCGGTACTTGGCTCCTAATTCCCAGCAAAATTC
TCGAACAGGCGGCGTATTGGCGCAAATTAACCCATAGTTGATGTCTGCGCCCCATTCTGTAAACAGTTTTATTAACTGATAGT
TGTTTTCCTTTGTAGCCAACATTAGTGCCGTATTAAGGTCCAAGCCGTCTGCAAAGCTTGGCAGCTTTATCAGCATATGTTTG
CAATCAAGGGAAATTGGGGCCTTATACCACCATAGTCCGCAGCGTTCTAAGATAACATGGTACTCAATAGATACTTGCTGTCT
GGCTAGTACCTTTTTGGCGAAGGATTGTAAGGAAGGAAACAT
China/2018/AnhuiXCGQ MGF 360 10L (MK128995.1:25402-26439)
SEQ ID No. 63
CTAGGCCAACATACTTTTTAATTTATAGTTTTTTAATAGATGATATATTTTGCTAGGATCTGCTTCTTTTAACGTTAATAGCG
AGGAGTCTGCACTATAAATGTCTAATGATAAATGATGAGATATCAAATAGTAATTCCGTTGCTCTGCTAGGGCCTTTGCCTCT
TCAAAGGCGTCGGCTCCCAGATCTATACAAAAGAACAAGTTATCCATATTATAAAATCGTACGCAGGCAAGCATAGCTGAATT
AATATTAGCTCCTAAGAGAAAACAATAATATATGGTTAAAAAATTGTTATCTTTTGTGCAGGCCATCCGCATCATTTCATCCA
CGTCCATGCGGATCTTTTCCTTTTCATACAAATTATGTAGGTCAAACAGCTTATTAAAACAAAGAGCACAGATTAACCACCAC
GTATTTAGATACTTAAAATGTTGGTAAACATAAGAAATGGCCTCCCTAAGATTATCCTGCAATGCCACTATAAAACAGTATAT
CGTTAACATATCACCATCCGACATATTACTTAATATGTCGGTGTCTTCTACTAACCTTTTCAACTTCCAATATATGGATGACC
TTATTTCCCTTATAATGACATAGGCTGGAAAGGGATTATCATTAAAAAGTTTAAGACATAAGATAATATTACTGCTAGTAGTG
CCAGGGTGTATTAATTTAAAGAACATGTGCATAATCTTCTTTTTATCCACGCGGTACTTGGCTCCTAATTCCCAGCAAAATTC
TCGAACAGGCGGCGTATTGGCGCAAATTAACCCATAGTTGATGTCTGCGCCCCATTCTGTAAACAGTTTTATTAACTGATAGT
TGTTTTCCTTTGTAGCCAACATTAGTGCCGTATTAAGGTCCAAGCCGTCTGCAAAGCTTGGCAGCTTTATCAGCATATGTTTG
CAATCAAGGGAAATTGGGGCCTTATACCACCATAGTCCGCAGCGTTCTAAGATAACATGGTACTCAATAGATACTTGCTGTCT
GGCTAGTACCTTTTTGGCGAAGGATTGTAAGGAAGGAAACAT
Ken06.Bus MGF 360 10L (NC_044946.1:23437-24507)
SEQ ID No. 64
TTACGACGTTGTATCATTGATGTGATAATCCAAATAGGCCAACATACTTTTTGATTTATAGTTGTTTAATAGATGGTATATTT
TTTTAGGGTTCGCTTCTTTTAGCGTGAATAGAGAGGGATCTGGATGATAGATATCTAATGACAAACGTTGTGATATTAAATAA
TAGTCCCGCTGCTCTGCTAGGGCTTTTGCCTCTTCGAAGGCATTGGCTCCCAAGTCTATACAAAAGAACAGATTATCTATATT
AAAGAACTGTATGGCAGCAAGCATGGCCATATTGATATCGGCCCCTAAAATAAAACAATAATACATCGTTAAAAAGTTATTAT
CTTTCGTGCAAGCTATGCGCATCATTTCATTAATGTCTATGCGAATCTTTTCCTGCTCATAGAGATAATGGAGGTCAGACAGT
TTATTAAAATACAGAGCACAGATTAACCACCACGTATTCATGTGCTTAAAATGTTCGTAAAAATACGAGACGGCCTCCCTAAG
ATCATTCTGCAAGGCCACCATAAAACAATATATAGTTAGCATATCGCCGTCCGAAACATCACGTAGTAGGTCTTCATCTTCTA
CTAACCTCCTCAGCCTCCAATAAAGAGACGACTTTATTTCCCTTATAATCACATAGGTAGGAAAAGGATTCTCATTAAAAAGC
TTATGACATAAGATAATATATTGACTTGTTTTGTTCTCTATAAATTTAAAGAACATGTGTATCACCTTTTTTTTATCCATGCG
ATAGTTCGCTCCTAATTCCCAACAAAACTCTCGGGTAGGCTGTGTATTGGCACAAATGTATCCATAGTTGATGTTTGCACCCC
ACTCCGTGAATAGTTTTATTAATTGATAGTTGTTTTCCTTTGCAGCTATCATCAATGCCGTATTGAGATCCAGGCCATCCGCA
AAGTATGGCAACCTTATTAACATGTGTTTGCAATCAAGTGAAATTGGAGCCGTATACCACCATAACCCGCAGTATTTCAAAAT
ATGATAGTAGTCTTCAGGCAGCACATGCTGACTGGCTAATATCTTTTTGGCGAAAGACTGTAAAGAAGGAAACAT
Ken05/Tk1 MGF 360 10L (NC_044945.1:27310-28380)
SEQ ID No. 65
TTACGACGTTGTATCATTATTGTGATAATCCAAATAGGCCGACATACTTTTTGATTTATAATTGTTTAATAGATGGTATATTT
TTTTAGGGTTCGCTTCTTTTAGCGTGAATAGAGAGGGATCTGGATGATAGATATCTAATGACAAACGATGTGATATTAAATAA
TAGTCCCGCTGCTCTGCTAGGGCTTTTGCCTCTTCGAAGGCATTGGCCCCCAAGTCTATACAAAAGAACAGATTATCTATATT
AAAAAACTGTATGGCAGCAAGCATCGCCATATTGATATCGGCCCCTAAAATAAAACAATAATACATCGTTAAAAAGTTGTTAT
CTTTCGTGCAAGCTATGCGCATCATTTCATTAATGTCTATGCGAATTTTTTCCTGCTCATAGAGATAATGGAGGTCAAACAGT
TTATTAAAACACAGAGCACAGATTAACCACCACGTATTCAGGTGCTTAAAATGTTGGTAAAAATACGAGACGGCCTCCCTAAG
ACCATTCTGCAAGGCCACCATAAAACAATATAAAGTTAGCATATCGCCGTCCGAAACATCGCGTAGTAGGTCTTCGTCTTCTA
CTAACCTCCTCAGCCTCCAATAAAGAGACGACTTTATTTCCCTTATAATCACATAGGTAGGAAAAGGATTCTCATTAAAAAGC
TTATGACATAAGATAATATATTGACTCGTTTTGTTCTCTATAAATTTAAAAAACATATGCATCACCTTTTTTTTATCTAAGCG
ATAGTTCGCTCCTAATTCCCAACAAAACTCTCGAGTAGGCTGTGTATTGGCACAAATGTATCCATAGTTGATGTTTGCACCCC
ACTCCGTGAACAGTTTTATTAATTGATAGTTGTTTTCCTTTGCAGCTATCATCAATGCCGTATTGAGGTCCAGGCCATCCGCA
AAGTATGGCAACCTTATTAACATGTGTTTACAATCAAGTGAAATTGGAGCCTTATACCACCATAACCCGCAGCGCTTCAAAAT
ATGATAGTAGTCTTCAGGCAGCACATGCTGGCTGGCTAATATCTTTTTGGCGAAAGATTGCAGGGAAGGAAACAT
Kenya 1950 MGF 360 10L (AY261360.1:29558-30628)
SEQ ID No. 66
TTACGACGTTGTATCATTAATGTGATAATCCAAATAGGCCGACATACTTTTTGATTTATAGTTGTTTAATAGATGGTATATTT
TTTTAGGGTTCGCTTCTTTTAGCGTGAATAGAGAGGGATCTGGATGATAGATATCTAATGACAAACGATGTGATATTAAATAA
TAGTCCCGCTGCTCTGCTAGGGCTTTTGCCTCTTCGAAGGCATTGGCCCCCAAGTCTATACAAAAGAACAGATTATCCATATT
AAAGAACTGTATGGCAGCAAGCATGGCCATATTGATATCGGCCCCTAAAATAAAACAATAATACATCGTTAAAAAGTTGTTAT
CTTTCGTGCAAGCTATGCGCATCATTTCATTAATGTCTATGCGAATTTTTTCCTGCTCATAGAGATAATGGAGGTCAAACAGT
TTATTAAAACACAGAGCACAGATTAACCACCACGTATTCAGGTGCTTAAAATGTTGGTAAAAATACGAGACGGCCTCCCTAAG
ATCATTCTGCAAGGCCACCATAAAACAATATAAAGTTAGCATATCGTCGTCCGAAACATCGCGTAGTAGGTCTTCGTCTTCTA
CTAATCTCCTCAGCCTCCAATAAAGAGACGACTTTATTTCCCTTATAATCACATAGGTAGGAAAAGGATTCTCATTAAAAAGC
TTATGACATAAGATAATATACTGACTCGTTTTGTTCTCTATAAATTTAAAAAACATATGCATCACCTTTTTTTTATCTAAGCG
ATAGTTTGCTCCTAATTCCCAACAAAACTCTCGAGTAGGCTGTGTATTGGCACAAATGTATCCATAGTTGATGTTTGCACCCC
ACTCCGTGAACAGTTTTATTAATTGATAGTTGTTTTCCTTTGCAGCTATCATCAATGCCGTATTGAGGTCCAGGCCATCCGCA
AAGTATGGCAACCTTATTAACATGTGTTTACAATCAAGTGAAATTGGAGCCTTATACCACCATAACCCGCAGCGCTTCAAAAT
ATGATAGTAGTCTTCAGGCAGCACATGCTGGCTGGCTAATATCTTTTTGGCGAAAGATTGCAGGGAAGGAAACAT
L60 MGF 360 10L (NC_044941.1:19956-21026)
SEQ ID No. 67
TTATAACGATGTATCATTGATGTCATAATTCAAATAGGCCAACATACTTTTTGATTTATAGTTTTTTAATAGACGATATATTT
TGTTAGGATCTGCTTCTTTTAACGTTAATAGCGAGGAGTCTGGACTATAAATGTCTAATGATAAACGATGAGATATCAAATAG
TAATTCTGTTGCTCTGCCAAGGCTTTTGCCTCTTCAAAGGCATCGGCCCCCAGATCTATACAAAAGAACAGGTTATCCATATT
ATAGAATCGTATGGAGGCAATCATGGCCAAATTAATATTAGCTCCTAAGATAAAACAATAATATATAGTTAAAAAATTGTTAT
CTTTTGTGCAGGCTATCCGCATCATTTCATCCATGTCCATACGGATTTTTTCTTTTTCGTACAAATTATGTAGGTCAAACAGC
TTATTATAGCAAAGAGCACATGTTAACCACCACGTATTCAGATACTTAAAATGTTGGTAAACATAAGAAATGGCCTCCCTAAG
ATTATCCTGCAATGCCACGATAAAACAGTATATAGTTAACATATCACCATCCGAAATATTACTTAATACGTTGGTATCTTCTG
CTAAATTTTTTAGCTTCCAATGTATACACGACTTTATTTCCCTTATAATGACATAGGCTGAAAAGGGATTGTCATTAAAAAAT
TTAAGACATAAGATAATATTATTACTAGTAGTGTTAGGATGTATTAATTTAAAGAATATGTGCATAATCTTCTTTTTATCCAC
TTGGTACTTGGCTCCTAATTCCCAGCAAAATTCTCGAATAGGTGGCGTATTCGCGCAAATTAACCCATAGTTGATGTCTGCGC
CCCAATCCGTAAACATTTTTATTAATTGATAGTTGTTTTCCTTTGTAGCCAACATTAGTGCCGTATTAAGGTCCAAGCCATCT
GCAAAGTTTGGCAGCTTTATCAGCATATGTTTGCAATCAAGTGAAATTGGAGCCTTATACCACCATAGCCCGCAGCGTTCTAA
GATAACATGGTAATCAATAGATACATGCTGACTGGCTAATACCTTTTTGGCGAAGGATTGCAAGGAAGGAACCAT
Benin 97/1 MGF 360 10L (NC_044956.1:19607-20677)
SEQ ID No. 68
TTATAACGATGTATCATTGATGTCATAATTCAAATAGGCCAACATACTTTTTGATTTATAGTTTTTTAATAGACGATATATTT
TGTTAGGATCTGCTTCTTTTAACGTTAATAGCGAGGAGTCTGGACTATAAATGTCTAATGATAAACGATGAGATATCAAATAG
TAATTCTGTTGCTCTGCCAAGGCTTTTGCCTCTTCAAAGGCATCGGCCCCCAGATCTATACAAAAGAACAGGTTATCCATATT
ATAGAATCGTATGGAGGCAATCATGGCCAAATTAATATTAGCTCCTAAGATAAAACAATAATATATAGTTAAAAAATTGTTAT
CTTTTGTGCAGGCTATCCGCATCATTTCATCCATGTCCATACGGATTTTTTCTTTTTCGTACAAATTATGTAGGTCAAACAGC
TTATTATAGCAAAGAGCACATGTTAACCACCACGTATTCAGATACTTAAAATGTTGGTAAACATAAGAAATGGCCTCCCTAAG
ATTATCCTGCAATGCCACGATAAAACAGTATATAGTTAACATATCACCATCCGAAATATTACTTAATACGTTGGTATCTTCTG
CTAAATTTTTTAGCTTCCAATGTATACACGACTTTATTTCCCTTATAATGACATAGGCTGAAAAGGGATTGTCATTAAAAAAT
TTAAGACATAAGATAATATTATTACTAGTAGTGTTAGGATGTATTAATTTAAAGAATATGTGCATAATCTTCTTTTTATCCAC
TTGGTACTTGGCTCCTAATTCCCAGCAAAATTCTCGAATAGGTGGCGTATTCGCGCAAATTAACCCATAGTTGATGTCTGCGC
CCCAATCCGTAAACATTTTTATTAATTGATAGTTGTTTTCCTTTGTAGCCAACATTAGTGCCGTATTAAGGTCCAAGCCATCT
GCAAAGTTTGGCAGCTTTATCAGCATATGTTTGCAATCAAGTGAAATTGGAGCCTTATACCACCATAGCCCGCAGCGTTCTAA
GATAACATGGTAATCAATAGATACATGCTGACTGGCTAATACCTTTTTGGCGAAGGATTGCAAGGAAGGAACCAT
Mkuzi 1979 MGF 360 10L (AY261362.1:27069-28139)
SEQ ID No. 69
TTATAACGATGTATCATTGATGTCATAATTCAAATAGGCCAACATACTTTTTGATTTATAGTTTTTTAATAGACGATATATTT
TGTTAGGATCTGCTTCTTTTAACGTTAATAGCGAGGAGTCTGGACTATAAATGTCTAATGATAAACGATGAGATATCAAATAG
TAATTCTGTTGCTCTGCCAAGGCCTTTGCCTCTTCAAAGGCATCGGCCCCCAGATCTATACAAAAGAACAGGTTATCCATATT
ATAGAATCGTATGGAGGCAATCATGGCCAAATTAATATTAGCTCCTAAGATAAAACAATAATATATAGTTAAAAAATTGTTAT
CTTTTGTGCAGGCTATCCGCATCATTTCATCCATGTCCATACGGATTTTTTCTTTTTCGTACAAATTATGTAGGTCAAACAGC
TTATTATAGCAAAGAGCACATGTTAACCACCACGTATTCAAATACTTAAAATGTTGGTAAACATAAGAAATGGCCTCCCTAAG
ATTATCCTGCAATGCCACGATAAAACAGTATATAGTTAACATATCACCATCCGAAATATTACTTAATACGTTGGTATCTTCTG
CTAAATTTTTTAGCTTCCAATGTATACACGACTTTATTTCCCTTATAATGACATAGGCTGAAAAGGGATTGTCATTAAAAAAT
TTAAGACATAAGATAATATTACTACTAGTAGTGCTAGGATGTATTAATTTAAAGAATATGTGCATAATCTTCTTTTTATCCAC
TTGGTGCTTGGCTCCTAATTCCCAGCAAAATTCTCGAATAGGTGGCGTATTCGCGCAAATTAACCCATAGTTGATGTCTGCGC
CCCAATCCGTAAACATTTTTATTAATTGATAGTTGTTTTCCTTTGTAGCCAACATTAGTGCCGTATTAAGGTCCAAGCCATCT
GCAAAGTTTGGCAGCTTTATCAGCATATGTTTGCAATCAAGTGAAATTGGAGCCTTATACCACCATAGCCCGCAGCGTTCTAA
GATAACATGGTGATCAATAGATACATGCTGACTGGCTAATACCTTTTTGGCGAAGGATTGCAAGGAAGGAAACAT
Pretorisuskop/96/4 MGF 360 10L (AY261363. 1:26116-27186)
SEQ ID No. 70
TTATAACGTTGTATTATTGACGTCATAATTCAAATAGGCCAATATACTTTTTGATTTATAGTTTTTTAATAGATGATATATTT
TGTTAGGATCCGCTTCTTTTAACGTTAATAACGAGGAATCTGGACTATAAATGTCTAATGATAAACAATGAGATATCAAAAAG
TAATTCCGTTGCTCTGCCAGGGCTTTTGCCTCCTCAAAGGCATCGGCCCCCAGGTCTATACAAAAGAATAAGTTATCTATGTT
ATAGAATTGTATGGAGGCAATCATAGCTAAATTAATATTAGCTCCTAAGATAAAACAATAATATATGGTTAAAAAATTGTTAT
CTTTTGTGCAGGCTATCCGCATCATTTCATCCATGTCCATGCGGATCTTTTCCTTTTCATACAAATGATGTAGGTCAAACACC
TTATTATAGCAAAGAACACATGTTAACCACCACGTATTCAGATACTTAAAATGTTGGTAAACATAAGAAATGGCCTCCCTAAG
ATTATCCTGCAATGCCACGATAAAACAGTATATAGTTAACATATCTCCATCCGAAATATTACTTAATACGTTGGTATCTTCTG
CTAACTTTTTTAGCTTCCAATGTATACACGACTTTATTTCCCTTATAATGACATAGGCTGAAAAGGGATTGTCATTAAAAAGT
TTAAGACATAAGATAATATTACTACTAGTAGTGCTAGGATGTATTAATTTAAAGAATATGTGCATAATCTTCTTTTTATCCAC
TTGGTACTTGGCTCCTAATTCCCAGCAAAATTCTCGAACAGGTGGCGTATTCGCGCAAATTAACCCATAGTTGATGTCTGCGC
CCCAATCCGTAAACATTTTTATTAATTGATAGTTGTTTTCCTTTGTAGCCAACATTAGTGCCGTATTAAGGTCCAAGCCATCT
GCAAAGTTTGGCAGCTTTATCAGCATATGTTTGCAATCAAGTGAAATTGGAGCCTTATACCACCATAGCCCGCAGCGTTCTAA
GATAATATGGTGATCAATGGATACATGCTGTCTGGCTAGTACCTTTTTGGCGAAGGATTGTAAGGAAGGAAACAT
Tengani 62 MGF 360 10L (AY261364.1:20530-21600)
SEQ ID No. 71
TTATAACAATGTATCATTGATATCATCATTCAAATAGGCCAACATATTTTTTGATTTATAGTTTTTTAATAGATGATTTATTT
TGTTAGGATCTGTTTCTTTTAACGTTAATAGCAAGGAGTCTGGCTTATAAATGTCTAATGATAAACGATGAGATATTAAATAG
TAATTCCGTTGCTCTGCCAGGGCTTTTGCCTCTTCAAAGGCGTCGGCTCCCAGATCTATACAAAAGAACAAGTTATCCATATT
ATAAAATCGTACGCAGGCAAGCATAGCTGAATTAATATTAGCTCCTAAGAGAAAACAATAATATATAGTTAAAAAATTGTTAT
CTTTTGTGCAGGCCATCCGCATCATTTCATCCACGTCCATGCGGATCTTTTCCTTTTCATACAAATTATGTAGGTCAAACAGC
TTATTAAAACAAAGAGCACAGATTAACCACCACGTATTTAGATACTTAAAATGTTGGTAAACATAAGAAATGGCCTCCCTAAG
ATTATCCTGCAATGCCACTATAAAACAGTATATCATTAACATATCACCATCCGACATATTACTTAATATGTCGGTGTCTTCTA
CTAACCTTTTCAGCTTCCAATATATGGATATCCTTATTTCCCTTATAATGACATAGGCTGGAAAGGGATTATCATTAAAAAGT
TTAAGACATAAGATAATATTACTGCTAGTAGTGCCAGGATGTATTAATTTAAAGAACATGTGTATAATCTTCTTTTTATCCAC
GCGGTGCTTGGCTCCTAATTCCCAGCAAAATTCTCGAACAGACGGCGTATTGGCGCAAATTAACCCATAGTTGATGTCTGCGC
CCCATTCCGTAAACAGTTTTATTAACTGATAGTTATTTTCCTTTGTAGCCAACATTAGTGCCGTATTAAGGTCCAAGCCGTCT
GCAAAGCTTGGCAGCTTTATCAGCATATGTTTGCAGTCAAGTGAAATTGGAGCCTTATACCACCATAGTCCGCAACGTTCTAA
GATAACATGGTACTCAATAGATACTTGCTGTCTGGCTAGTACCTTTTTGGCGAAGGATTGTAAGGAAGGAAACAT
Warthog MGF 360 10L (AY261366.1:22069-23130)
SEQ ID No. 72
TCATATTGTATCATCATGGTTAAAATATGCCGTCATATTTTTTGATTTATAGTTTTTTAATAGATGATATATTTTGTTAGGGT
CCGCTTCTTTTAACGTTAATAGCGAGGAGTCTGGACTATAAATGTCTAATGATAAACGATGAGATATCAAAAAGTAATTCCGT
TGCTCTGCCAGGGCTTTTGCCTCTTCAAAGGCATCGGCCCCCAAGTCTATACAAAAGAACAGGTTATCCATATTATAAAATCG
TATGGAGGCAATCATGGCCAAATTAATATTAGCTCCTAAGATAAAACAATAATATATAGTTAAAAAATTGTTATCTTTTGTGC
AGGCTATCCGCATCATTTCATCCATGTCCATGCGGATTTTTTCCTTTTCGTACAAATTATGTAGGTCAAACAGCTTATTAAAA
CAAAGAGCACAGATTAGCCACCACGTATTCAGATATTTAAAATGTTGGTAAACATAAGAAATGGCCTCCCTAAGATTATCCTG
CAATGCCACCATAAAACAGTATATCGTTAACATATCACCATCCGAAATATTACTTAATACGTCGGTGTCTTCTACTAACTTTT
TCAGCTTCCAATATATGGATGACTTTATTTCCCTTATAATGACATAGGCTGAAAAGGGGTTATCATTAAAAAGTTTAAGACAT
AAGATAATATTACTGCTAGTAGTGCCAGGATGTATTAATTTAAAGAACATGTGCATAATCTTCTTTTTATCCACGCGGTACTT
GGCTCCTAGTTCCCAGCACAATTCTCGAACAGGCGGCGTATTGGCGCAAATTAACCCATAGTTGATGTCTGCGCCCCATTCCG
TAAACAGTTTTATTAACTGATAGTTGTTTTCCTTTGTAGCCAACATTAGTGCCGTATTAAGGTCCAAGCCATCTGCAAAGCTT
GGCAGCTTTATCAGCATATGTTTGCAATCAAGGGAAATTGGAGCCTTATACCACCATAGTCCGCAGCGTTCTAAGATAACATG
GTAATCAATAGATACATGCTGTCTGGCTAGTACCTTTTTGGCGAAGGATTGTAA
GGAAGGAAACAT
Warmbaths MGF 360 10L (AY261365.1:25300-26361)
SEQ ID No. 73
TCATATTGTATCATCATGGTTAAAATATGCCGTCATATTTTTTGATTTATAGTTTTTTAATAGATGATATATTTTGTTAGGGT
CCGCTTCTTTTAACGTTAATAGCGAGGAGTCTGGACTATAAATGTCTAATGATAAACGATGAGATATCAAAAAGTAATTCCGT
TGCTCTGCCAGAGCCTTTGCCTCTTCAAAGGCGTCGGCCCCCAGGTCTATACAAAAGAACAGGTTATCCATATTATAGAATCG
TATGGAGGCAATCATGGCCAAATTAATATTAGCTCCTAAGATAAAACAATAATATATAGTTAAAAAATTGTTATCTTTTGTGC
AGGCTATCCGCATCATTTCATCCATGTCCATGCGGATTTTTTCCTTTTCGTACAAATTATGTAGGTCAAACAGCTTATTAAAA
CAAAGAGCACAGATTAGCCACCACATATTCAGATACTTAAAATGTTGGTAAACATAAGAAATGGCCTCCCTAAGATTATCCTG
CAATGCCACCATAAAACAGTATATCGTTAACATATCACCATCTGAAATATCACTTAATACGTCGGTGTCTTCTACTAACTTTC
TCAGCTTCCAATATATGGATGACTTTATTTCCCTTATAATGACATAGGCTGAAAAGGGGTTATCATTAAAAAGTTTAAGACAT
AAGATAATATTACTGCTAGTAGTGCCAGGATGTATTAATTTAAAGAACATGTGCATAATCTTCTTTTTATCCACGCGGTACTT
GGCTCCTAGTTCCCAGCACAATTCTCGAACAGGCGGTGTATTGGCGCAAATTAACCCATAGTTGATGTCTGCGCCCCATTCCG
TAAACAGTTTTATTAACTGATAGTTGTTTTCCTTTGTAGCCAACATTAGTGCCGTATTAAGGTCCAAGCCATCTGCAAAGCTT
GGCAGCTTTATCAGCATATGTTTGCAATCAAGTGAAATTGGAGCCTTATACCACCATAGTCCGCAGCGTTCTAAGATAACATG
GTAATCAATAGATACATGCTGTCTGGCTAGTACCTTTTTGGCGAAGGATTGTAA
GGAAGGAAACAT
Malawi Lil-20/1 (1983) MGF 360 10L (AY261361.1:23735-24802)
SEQ ID No. 74
TTACACTGTGTCATGCCCATCATAGTCAAAATATACCATCATATTTTTTGATTTATAGTTTTTTAATAGATGATATATTTTTT
TAGGATCTGCTTCTTTTAACGTTAATAGCGAGGAGTCTGGACTATAAATATCTATTGATAAACGATGATACATCAAAAAGTAA
TTCCGCTGGTCTGCCAGGGCTTTTGCCTCTTCAAAGGCATCGGCTCCCAGGTCTATACAAAAGAACAAGTTATCCATATTATA
GAATTGTACGCAGGCAAGCATAGCCTGATTAATATTAGCTCCTAAGAGAAAACAGTAATATATGGTTAAAAAGTTGTTATCTT
TAGTGCAGGCTATGCACATCATTTCATCCATGTCCATGCGGATCTTTTCCTTTTCATACAAATCATGTAGGTCAAACAGCTTA
TTAAAACAAAGAGCACAGATTAACCACCACGTATTCAGATGCTTAAAATGTTGGTAAAAATAAGAAATGGCCTCCCTAAGATT
ATCCTGCAATGCCAGGATAAAACAGTATATAGTCAACATATCATCATCCGACATATTACTTAATATGTCAGTGTCTTCTACTA
ACCTTCTCAGCTTCCAATATATAGACGACTTTATTTCCCTTATAATGACATAGGTTGGAAAAGGATTATTATTAAAAAGTTTA
AGACATAAGATAATATTACTACTAGTAGTGCCATGATGTATTAATTTAAAAAACATATGCATAACCTTATTTTTATCCACTTG
GTACTTGGCTCCTAATTCCCAGCAAAATTCTCGAACAGGCGGCGTATTAGCGCAAATTAATCCATAGTTGATGTCCGCGCCCC
ATTCCGTAAACAGTTTTATTAACTGATAGTTGTTTTCCTTTGTAGCCAACATTAGTGCCGTATTAAGGTCCAAGCCATCTGCA
AAGCTTGGCAGCTTTATTAACATATGTTTGCAATCAAGTGAAATTGGAGCCTTATACCACCATAGTCCGCAATGTTTTAAGAT
ATAATGATAATCAATGGATACATGATGTCTAGCTAATACCTTTTTGGCGAAGGATTGTAAAGAAGGAAACAT

[0232] In an embodiment the attenuated ASFV of the invention comprises a functional version of MGF 360 10L. Suitably the functional version of MGF 360 10L comprises the sequence of SEQ ID No. 62, 63, 64, 65, 66, 67, 68, 69, 70, 71, 72, 73 or 74. Suitably the functional version of MGF 360 10L comprises a sequence having at least 70%, at least 80%, at least 90% or at least 95% identity with SEQ ID No. 62, 63, 64, 65, 66, 67, 68, 69, 70, 71, 72, 73 or 74. Suitably the functional version of MGF 360 10L consists of the sequence of SEQ ID No. 62, 63, 64, 65, 66, 67, 68, 69, 70, 71, 72, 73 or 74.

### MGF 360 11L Gene Sequences

Georgia 2007/1 MGF 360 11L (NC_044959.1:26465-27526)
SEQ ID No. 75
TTATCTTTGTTCATAATCAAGAAAAATCCCCATATTTATTGAGTGATAATTTTTTAACATGCAATTTATTTTTTCAGGGTCCG
TAACGATCGACAACAGAGAAATAACCGGATTGTAATGCTTTAATGATAAGGCATGGGCTATCAGATAATTTTCCTTTTGTTCT
GCCAAAGCTTTGCCCTCCTCAAAGGCATCGGCACCCAGGTCTATACAAAAGAACAGGTTTCCAAGATTATAGTTTTGTATGGA
AACAAGCATGGCTTGATTGATGTTGGCTCCCATGATAAAACAGTAGTAAATGGCCGAATAGCTATAATCTTGGATGCAGGCTA
TGTGCATCATTTCATCAATATCCATGCGGACCCTTTCTATTTCGTACAGCTCGTGAAGGTCGAACACGTTGTTGTAAAAAAGG
GCGCACATGAGCCGCCACCTATGTAGACGCGGGTATTTCTGGTAAAAGTAGCGGATAGCATCTTTGAGGTCATAGTCCACCGC
TATCGCGTACCAGTATTTGGTTAAAACAGTGCTAAAGCTATCATCATGGTCCAGCATGAAGGTTATCTCCATGAGCCCTCTTA
ACTCCCACATGATTTCCCCCCTCAGATCCAGATTATCTATAATCCTTAAATTGGGGTTATTGGAAAACACCTCGTGGCAAAAG
ATAATATTGCTACTGGTTTTATCGCGCGTTGTATCAAAGAAAATTTTTAAAATATACTCTCTTTCTAAATATTCTTTGGCTCC
CAGCTCTTTGCACAGATCACGGGTATTTTCCGTGAGAGCACAAATCATTCCATAGTTAATATCTGCACCCCATTCAGTAAACA
GCTTTATCAAGTCATGATTATTCTCCTTCACGGCTTTCATCAGTCCTATGTTTAACTCGATACCTTGACTAAAACAGGTTGAC
CTTATAAATAATTTATTGCGTCGAATATGAAGCATAATGGGGCCATTATGCCACCACAGGCCACAACACTTCAGGACATGATA
TTGATCTACCGGTATACACTGCCCGGCCAGTACTTTCTTCGTGAGGGATTGCAGGGAAGGCAACAT
China/2018/AnhuiXCGQ MGF 360 11L (MK128995.1:26467-27528)
SEQ ID No. 76
TTATCTTTGTTCATAATCAAGAAAAATCCCCATATTTATTGAGTGATAATTTTTTAACATGCAATTTATTTTTTCAGGGTCCG
TAACGATCGACAACAGAGAAATAACCGGATTGTAATGCTTTAATGATAAGGCATGGGCTATCAGATAATTTTCCTTTTGTTCT
GCCAAAGCTTTGCCCTCCTCAAAGGCATCGGCACCCAGGTCTATACAAAAGAACAGGTTTCCAAGATTATAGTTTTGTATGGA
AACAAGCATGGCTTGATTGATGTTGGCTCCCATGATAAAACAGTAGTAAATGGCCGAATAGCTATAATCTTGGATGCAGGCTA
TGTGCATCATTTCATCAATATCCATGCGGACCCTTTCTATTTCGTACAGCTCGTGAAGGTCGAACACGTTGTTGTAAAAAAGG
GCGCACATGAGCCGCCACCTATGTAGACGCGGGTATTTCTGGTAAAAGTAGCGGATAGCATCTTTGAGGTCATAGTCCACCGC
TATCGCGTACCAGTATTTGGTTAAAACAGTGCTAAAGCTATCATCATGGTCCAGCATGAAGGTTATCTCCATGAGCCCTCTTA
ACTCCCACATGATTTCCCCCCTCAGATCCAGATTATCTATAATCCTTAAATTGGGGTTATTGGAAAACACCTCGTGGCAAAAG
ATAATATTGCTACTGGTTTTATCGCGCGTTGTATCAAAGAAAATTTTTAAAATATACTCTCTTTCTAAATATTCTTTGGCTCC
CAGCTCTTTGCACAGATCACGGGTATTTTCCGTGAGAGCACAAATCATTCCATAGTTAATATCTGCACCCCATTCAGTAAACA
GCTTTATCAAGTCATGATTATTCTCCTTCACGGCTTTCATCAGTCCTATGTTTAACTCGATACCTTGACTAAAACAGGTTGAC
CTTATAAATAATTTATTGCGTCGAATATGAAGCATAATGGGGCCATTATGCCACCACAGGCCACAACACTTCAGGACATGATA
TTGATCTACCGGTATACACTGCCCGGCCAGTACTTTCTTCGTGAGGGATTGCAGGGAAGGCAACAT
L60 MGF 360 11L (NC_044941.1:21052-22113)
SEQ ID No. 77
TTATCTTTGTTCATAATCAAGAAAAATCCCCATATTTATTGAGTGATAATTTTTTAACATGTAATTTATTTTTTCAGGGTCCA
TAACGTTCGACAACAGAGAAATGACTGGATTGTAATGCTTTAATGATAAGGCATGGGCTATCAGATAATTTTCCTTTTGTTCT
GCCAAAGCTTTGCCCTCCTCAAAGGCGTTGGCGCCCAGGTCTATACAAAAGAACAGGTTTCCAAGATTATAGTTTTGTATGGA
AACCAGCATGGCTTGATTGATGTTGGCTCCCATGATAAAACAGTAGTAAATGGCCGAATAGCTATAATCTTGGATGCAGGCTA
TGTGCATCATTTCATCGATATCCATGCGGACCCTTTCTATTTCATACAGCTCGTGAAGGTCGAACACGTTGTTGTAAAAAAGG
GCGCACATGAGCCGCCACCGATGTAGGCGCGGGTATTTCTGGTAAAAGTAGCGAATAGCATCTTTGAGGTCATAGTCCACCGC
TATAGCATACCAGTATTTGGTTAAAACAGTGCTAAAGCTATCATCATGGTCTAGCATGAAGGTTATCTCCATGAGCCCTCTTA
ACTCCCACATGATTTCCCCCCTCAGATCCAGATTATCTATAATCCTTAAATTGGGGTTATTGGAAAACACCTCGTGGCAAAAG
ATAATATTGCTACTGGTTTTATCGCGCGTCGTATCAAAGAAAATTTTTAAAATATACTCTCTTTCTAAATATTCTTTGGCTCC
CAGCTCTTTGCACAGATCACGGGTATTTTCCGTGAGAGCACAAATCATTCCATAGTTAATATCTGCACCCCATTCAGTAAACA
GCTTTATCAAGTCATGATTATTCTCCTTCACGGCTTTCATCAGTCCTATGTTTAACTCGATACCTTGACTAAAGCAGGTTGAC
CTTATAAATAGTTTATTACGTCGAATATGAAGCATAATGGGGCCATTATGCCACCACAGGCCACAACACTTCAGGATATGATA
ATGATCCACCGACACGCACTGCCCGGCCAGTACTTTCTTCGTGAGGGATTGCAGGGAAGGCAACAT
Benin 97/1 MGF 360 11L (NC_044956.1:20703-21764)
SEQ ID No. 78
TTATCTTTGTTCATAATCAAGAAAAATCCCCATATTTATTGAGTGATAATTTTTTAACATGTAATTTATTTTTTCAGGGTCCA
TAACGTTCGACAACAGAGAAATGACTGGATTGTAATGCTTTAATGATAAGGCATGGGCTATCAGATAATTTTCCTTTTGTTCT
GCCAAAGCTTTGCCCTCCTCAAAGGCGTTGGCGCCCAGGTCTATACAAAAGAACAGGTTTCCAAGATTATAGTTTTGTATGGA
AACCAGCATGGCTTGATTGATGTTGGCTCCCATGATAAAACAGTAGTAAATGGCCGAATAGCTATAATCTTGGATGCAGGCTA
TGTGCATCATTTCATCGATATCCATGCGGACCCTTTCTATTTCATACAGCTCGTGAAGGTCGAACACGTTGTTGTAAAAAAGG
GCGCACATGAGCCGCCACCGATGTAGGCGCGGGTATTTCTGGTAAAAGTAGCGAATAGCATCTTTGAGGTCATAGTCCACCGC
TATAGCATACCAGTATTTGGTTAAAACAGTGCTAAAGCTATCATCATGGTCTAGCATGAAGGTTATCTCCATGAGCCCTCTTA
ACTCCCACATGATTTCCCCCCTCAGATCCAGATTATCTATAATCCTTAAATTGGGGTTATTGGAAAACACCTCGTGGCAAAAG
ATAATATTGCTACTGGTTTTATCGCGCGTCGTATCAAAGAAAATTTTTAAAATATACTCTCTTTCTAAATATTCTTTGGCTCC
CAGCTCTTTGCACAGATCACGGGTATTTTCCGTGAGAGCACAAATCATTCCATAGTTAATATCTGCACCCCATTCAGTAAACA
GCTTTATCAAGTCATGATTATTCTCCTTCACGGCTTTCATCAGTCCTATGTTTAACTCGATACCTTGACTAAAGCAGGTTGAC
CTTATAAATAGTTTATTACGTCGAATATGAAGCATAATGGGGCCATTATGCCACCACAGGCCACAACACTTCAGGATATGATA
ATGATCCACCGACACGCACTGCCCGGCCAGTACTTTCTTCGTGAGGGATTGCAGGGAAGGCAACAT
Mkuzi 1979 MGF 360 11L (AY261362.1:28164-29225)
SEQ ID No. 79
TTATCTTTGTTCATAATCAAGAAAAATCCCCATATTTATTGAGTGATAATTTTTTAACATGTAATTTATTTTTTCAGGGTCCA
TAACGATCGACAACAGAGAAATGACCGGATTGTAATGCTTTAATGATAAGGCATGGGCTATCAGATAATTTCCCTTTTGTTCT
GCCAAAGCTTTGCCCTCCTCAAAGGCGTTGGCGCCCAGGTCTATACAAAAGAACAGGTTTCCAAGATTATAGTTTTGTATGGA
AACCAGCATAGCTTGATTGATGTTGGCTCCCATGATAAAACAGTAGTAAATGACCGAATAGCTATAATCTTGGATGCAGGCTA
TGTGCATCATTTCATCAATATCCATGCGGACCCTTTCTATTTCATACAGCTCGTGAAGGTCGAACACGTTGTTGTAAAAAAGG
GCGCACATGAGCCGCCACCTATGTAGGCGCGGGTATTTCTGGTAAAAGTAGCGAATAGCATCTTTGAGGTCATAGTCCACCGC
TATAGCATACCAGTATTTGGTTAAAACAGTGCTAAAGCTATCATCATGGTCTAGCATGAAGGTTATCTCCATGAGCCCTCTTA
ACTCCCACATGATTTCTCCCCTCAGATCCAGATTATCTATAATCCTTAAATTGGGGTTATTGGAAAACACCTCGTGGCAAAAG
ATAATATTGCTACTGGTTTTATCGCGCGTCGTATCAAAGAAAATTTTTAAAATATACTCTCTTTCTAAATATTCTTTGGCTCC
CAGCTCTTTGCACAGATCACGGGTATTTTCCGTGAGAGCACAAATCATTCCATAGTTAATATCTGCACCCCATTCAGTAAACA
GCTTTATCAAGTCATGATTATTCTCCTTCACGGCTTTCATCAGTCCTATGTTTAACTCGATACCTTGACTAAAGCAGGTTGAC
CTTATAAATAGTTTATTACGTCGAATATGAAGCATAATGGGGCCATTATGCCACCACAGGCCACAACACTTCAGGATATGATA
ATGATCCACCGACACGCACTGCCCGGCCAGTACTTTCTTCGTGAGGGATTGCAGGGAAGGCAACAT
Warmbaths MGF 360 11L (AY261365.1:26388-27449)
SEQ ID No. 80
TTATCTTTGTTCATAATCAAGAAAAATCCCCATATTTATTGAGTGATAATTTTTTAACATGCGATTTATTTTTTCAGGGTCCG
TAACCACCGACAACAGAGAAATGACCGGATTGTAATGCTTTAATGATAAGGCATTGGCTATCAGATAATTTCCCTTTTGTTCT
GCCAAAGCTTTGCCCTCCTCAAAGGCGTTGGCACCCAGGTCTATACAAAAGAACAGGTTCCCAAGATTATAGTTTTGTATGGA
AACCAGCATGGCTTGATTGATGTTGGCTCCCATGATAAAACAGTAGTAGATGGCTGAATAGCTATAATCTTGGACGCAGGCTA
TGTGCATCATTTCATCAATGTCCATGCGGACCCTTTCTATTTCATACAGCTCGTGAAGGTCGAACACGTTGTTGTAAAAAAGG
GCGCACATGAGCCGCCACCTATGTAGCCGCGGGTATTTCTGGTAAAAGTAGCGGATAGCATCTTTGAGGTCATAGTCCACCGC
TATCGCGTACCAGTATTTGGTTAAAACAGTGCTAAAGCTATCATCATGGTCCAGCATGAAGGTTATCTCCATGAGCCCTCTTA
ACTCCCACATGATTTCCCCCCTCAGATCCAGATTATCTATAATCCTTAAATTGGGGTTATTGGAAAACACCTCGTGGCAAAAG
ATAATATTGTTACTGGTTTTATCGCGCGTTGTATCAAAGAAAATTTTTAAAATATACTCTCTTTCTAAATATTCTTTGGCTCC
CAGCTCTTTGCACAGATCACGGGTATTTTCCGTGAGAGCACAAATCATTCCATAGTTAATATCTGCACCCCATTCAGTAAACA
GCTTTATCAAGTCATGATTATTCTCCTTCACGGCTTTCATCAGTCCTATGTTTAACTCGATACCTTGACTAAAGCAGGTTGAC
CTTATAAATATTCTATTACGTCGAATATGAAGCATTATGGGGCCATTATGCCACCACAGGCCACAACACTTCAGGATATGATA
ATGATCCACCGACACGCACTGCCCGGCCAGTACTTTCTTCGTGAGGGATTGCAGGGAAGGCAACAT
Pretorisuskop/96/4 MGF 360 11L (AY261363.1:27214-28275)
SEQ ID No. 81
TTATCTTTGTTCATAATCAAGAAAAATCCCCATATTTATTGAGTGATAATTTTTTAACATGCGATTTATTTTTTCAGGGTCCG
TAACCACCGACAACAGAGAAATGACCGGATTGTAATGCTTTAATGATAAGGCATTGGCTATCAGATAATTTCCCTTTTGTTCT
GCCAAAGCTTTGCCCTCTTCAAAGGCGTTGGCACCCAGGTCTATACAAAAGAACAGGTTCCCAAGATTATAGTTTTGTATGGA
AACCAGCATGGCTTGATTGATGTTGGCTCCCATGATAAAACAGTAGTAAATGGCTGAATAGCTATAATCTTGGACGCAGGCTA
TGTGCATCATTTCATCAATGTCCATGCGGACCCTTTCTATTTCATACAGCTCGTGAAGGTCGAACACGTTGTTGTAAAAAAGG
GCGCACATGAGCCGCCACCTATGTAGCCGCGGGTATTTCTGGTAAAAGTAGCGGATAGCATCTTTGAGGTCATAGTCCACCGC
TATCGCGTACCAGTATTTGGTTAAAACAGTGCTAAAGCTATCATCATGGTCCAGCATGAAGGTTATCTCCATGAGCCCTCTTA
ACTCCCACATGATTTCCCCCCTCAGATCCAGATTATCTATAATCCTTAAATTGGGGTTATTGGAAAACACCTCGTGGCAAAAG
ATAATATTGTTACTGGTTTTATCGCGCGTTGTATCAAAGAAAATTTTTAAAATATACTCTCTTTCTAAATATTCTTTGGCTCC
CAGCTCTTTGCACAGATCACGGGTATTTTCCGTGAGAGCACAAATCATTCCATAGTTAATATCTGCACCCCATTCAGTAAACA
GCTTTATCAAGTCATGATTATTCTCCTTCACGGCTTTCATCAGTCCTATGTTTAACTCGATACCTTGACTAAAGCAGGTTGAC
CTTATAAATATTCTATTACGTCGAATATGAAGCATTATGGGGCCATTATGCCACCACAGGCCACAACACTTCAGGATATGATA
ATGATCTACCGACACGCACTGCCCAGCCAGTACTTTCTTCGTGAGGGATTGCAGGGAAGGCAACAT
Tengani 62 MGF 360 11L (AY261364.1:21627-22688)
SEQ ID No. 82
TTATCTTTGTTCATAATCAAGAAAAATCCCCATATTTATTGAGTGATAATTTTTTAACATGCAATTTATTTTTTTAGGGTCTG
TAACGACCGACAACAGAGAAATGACCGGATTGTAATGCTTTAATGATAAGGCATCGGCTATCAGATAATTTCCCTTTTGTTCT
GCCAAAGCTTTGCCTTCCTCAAAGGCGTTGGCTCCCAGGTCTATACAAAAGAACAGGTTCCCAAGATTATAGTTTTGTATGGA
AACCAGCATGGCTTGATTGATGTTGGCTCCCATGATAAAACAGTAGTAAATGGCCGAATAGCTATAATCTTGGACGCAGGCTA
TGTGCATCATTTCATCAATGTCCATGCGGACCCTTTCTATTTCGTACAGCTCGTGAAGGTCGAACACGTTGTTGTAAAAAAGG
GCGCACATGAGCCGCCACCTATGTAGACGCGGGTATTTCTGGTAAAAGTAGCGGATCGCATCTTTGAGGTCATAGTCCACCGC
TATCGCGTACCAGTATTTGGTTAAAACAGTGCTAAAGCTATCATCATGGTCCAGCATGAAGGTTATCTCCATGAGCCCTCTTA
ACTCCCACATGATTTCCCCCCTCAGATCCAGATTATCTATAATCCTTAAATTGGGGTTATTGGAAAACACCTCGTGGCAAAAG
ATAATATTGTTACTGGTTTTATCGCGCGTCGTATCAAAGAAAATTTTTAAAATATACTCTCTTTCTAAATATTCTTTGGCACC
CAGCTCTTTGCACAGATCACGGGTATTTTCCGTGAGAGCACAAATCATTCCATAGTTAATATCTGCACCCCATTCAGTAAACA
GCTTTATCAAGTCATGATTATTCTCCTTCACGGCTTTCATCAGTCCTATGTTTAACTCGATACCTTGACTAAAGCAGGTTGAC
CTTATAAATAGTTTATTACGTCGAATCTGAAGCATAATGGGTCCATTATGCCACCACAGGCCACAACACTTCAGGATATGATA
ATGATCCACCGACACGCACTGCCCGGCCAGTACTTTCTTCGTGAGGGATTGCAGGGAAGGCAACAT
Warthog MGF 360 11L (AY261366.1:23157-24218)
SEQ ID No. 83
TTATCTTTGTTCATAATCAAGAAAAATCCCCATATTTATTGAGTGATAATTTTTTAACATGCGATTTATTTTTTCAGGGTCCG
TAACCACCGACAACAGAGAAATGACCGGATTGTAATGCTTTAATGATAAGGCATTGGCTATCAGATAATTTCCCTTTTGTTCT
GCCAAAGCTTTGCCCTCCTCAAAGGCGTTGGCCCCCAGGTCTATACAAAAGAACAGGTTCCCAAGATTATAGTTTTGTATGGA
AACCAGCATGGCTTGATTGATGTTGGCTCCCATGATAAAACAGTAGTAAATGGCTGAATAGCTATAATCTTGGACGCAGGCTA
TGTGCATCATTTCATCAATGTCCATGCGGACCCTTTCTATTTCATACAGCTCGTGAAGGTCGAACACGTTGTTGTAAAAAAGA
GCGCACATGAGCCGCCACCTATGTAGCCGCGGGTATTTCTGGTAAAAGTAGCGGATAGCATCTTTGAGGTCATAGTCCACCGC
TATCGCGTACCAGTATTTGGTTAAAACAGTACTAAAGCTATCATCATGGTCCAGCATGAAGGTTATCTCCATGAGCCCTCTTA
ACTCCCACATGATTTCTCCCCTTAGATCCAGATTATCTATAATCCTTAAATTGGGGTTATTGGAAAACACCTCGTGGCAAAAG
ATAATATTGTTACTGGTTTTATCGCGCGTTGTATCAAAGAAAATTTTTAAAATATACTCTCTTTCTAAATATTCTTTGGCTCC
CAGCTCTTTGCACAGATCACGGGTATTTTCCGTGAGAGCACAAATCATTCCATAGTTAATATCTGCACCCCATTCAGTAAACA
GCTTTATCAAGTCATGATTATTCTCCTTCACGGCTTTCATCAGTCCTATGTTTAACTCGATACCTTGACTAAAGCAGGTTGAC
CTTATAAATATTCTATTACGTCGAATATGAAGCATTATGGGGCCATTATGCCACCACAGGCCACAACACTTCAGGATATGATA
ATGATCCACCGATACGCACTGCCCGGCCAGTACTTTCTTCGTGAGGGATTGCAGGGAAGGCAACAT
Malawi Lil-20/1 (1983) MGF 360 11L (AY261361.1:24831-25892)
SEQ ID No. 84
TTATCTTCGTTCATAATCAAGAAAAACCCTCATATTTATTGAGTGATAATTTTTTAACATGCAATTTATTTTTTCAGGGTCCA
TAATGACCGACAACAGAGAAATGACCGGATTGTAATGCTTTAATGATAAGGCATCGGCTATCAGATAATTTTCCTTTTGTTCT
GCCAAAGCTTTCCCCTCCTCAAAGGCGTTGGCCCCCAGATCTATACAAAAGAACATGTTCCCAAGATTATAGTTTTGTATAGA
AACAAGCATGGCTTGATTGATGTTGGCCCCCATGATAAAACAGTAATAAATAGCCGCATAGCTATAATCTTGGACGCAGGCTA
TGTGCATCATTTCATCAATATCCATGCGGACCCTTTCTATTACATACAGCTCGTGAAGGTCGAACACGTTGTTGTAAAAAAGG
GCGCACATAAGCCGCCAGTGGTGTAGATGGGTATACCTCTGATAAAAATAATGGATAGCCTTTTTGAGGCCATAGTCTACCGC
TATGGCGTACCAGTATTTGGTTAACATATTGCTAAAGGAGTTGTCATGGTCCAACATGTAGGTTATCTCCATGAGTCCCCTTA
GCTCCCACATGATTTCCTCCCTCAGATCCAAATTATCCACATTTTTCAGGTTGGGGTTATTGGAAAACATTTCGTGGCATAAG
ATAATATTACTGTCGGTTTTGTTGCGCGTCGTATCAAAGAAAATTTTTAAAATATAATCTCTATCTAAACGATCTTTGGCTCC
TAGTTCTCTGCATAGATTACGGGTGTGCTCCGTATGGGCACAAATCAGTCCATAATTAATATCGGCACCCCACTCGGCAAACA
GCCTTATCAAGTCATGGTTGTTTTCCTTCGCGGCTTTCATCAGTACGGTGTTCAATTCAATACCCTCGCTAAAACAGGTTGAC
CTTATAAACATTTTGTGACGATAAACGTAAAATGTAATAGGGCCATCATACCACCACAACCCGCAGCACTTTAAGACATGATA
TTGATCTACCGGTACACACTGTTTGGCCAGCACTTTCTTAGTTAAAGATTGTAAGGAAGGCAACAT
Kenya 1950 MGF 360 11L (AY261360.1:30655-31716)
SEQ ID No. 85
TTATCTGCGTTCATAATCGAGAAAAACCACCATATTCTTTGAGTGATAATTTTTTAACATAGAATTTATCTTTTCTGGGTCGG
TCACGGCCGACAACAGGGAAATCACCGGGTTATAATGTTTTAATGATAAGGCATCGGCTATCAAATAATTTTCCTTTTGTATT
GCTAGGGTTTTGCCTTCTTCAAAGGCGTTGGCACCCAGGTCTATACAAAAGAACATGTTCCCGAGATTATAGTTTTGTATGGA
AACAAACATGGCTTGATTGATGTTGGCCCCCATGATAAAACAGTAGTAGATAGCTGAATAGCTATAATCTTGGATGCAGGCTA
TGTGCATCATCTCATCGATATCCATGCGGACCCTTTCTATTTCATACAGCTCGTGAAGGTCGAACACATTGTTATAAAAAAGG
GCGCACATAAGCCGCCACCGATGTAGATGGGTATACTTCTGATAAAAATAGTGGATGGCCTTTTTGAGGCCGTAGTCTACCGC
TATGGCGTACCAGTATTTGGTTAACATATTGCTGAAGGAGTTGTCATGGTCCAACATGTAGGTTATCTCCATGAGTCCCCTTA
GCTCCCACATGATTTCCTCCCTCAGATCCAAATCATCCACATGTTTCAGATTGGGGTTATTGGAAAACATTTCGTGGCATAAG
ATAATATTACTGTCGGTTTTGTTGCGCGTCGTATCAAAGAAAATTTTTAAAATATACTCTCTATCTAAACGGTCTTTGGCTCC
AAGTTCTCTGCATAGATTGCGGGTGTGCTCCGAATGAGCACAAACCAGTCCATAATTAATATCGGCACCCCACTCAACAAACA
GCCTTATCAAGTCATGATTGTTTTCCTTCGCGGCTTTCATCAGTACGGTGTTCAATTCAATACCCTCGCTAAAACAGGTTGAC
TTTATAAACATTTTGTTACGATACGTATAAAATGTAATAGGGCCATCATACCACCACAACCCGCAGCATTTCAGGATATGATA
TTGATCTACCGGTATACACTGTTTGGCCAGCACTTTCTTGGATAGGGATTGCAAGGAAGGCAACAT
Ken05/Tk1 MGF 360 11L (NC_044945.1:28407-29468)
SEQ ID No. 86
TTATCTGCGTTCATAATCGAGAAAAACCACCATATTCTTTGAGTGATAATTTTTTAACATAGAATTTATCTTTTCTGGGTCGG
TCACGGCCGACAACAGGGAAATCACCGGGTTATAATGTTTTAATGATAAGGCATCGGCTATCAAATAATTTTCCTTTTGTATT
GCTAGGGCTTTGCCTTCTTCAAAGGCGTTGGCACCCAGGTCTATACAAAAGAACATGTTCCCGAGATTATAGTTTTGTATGGA
AACAAACATGGCTTGATTGATGTTGGCCCCCATGATAAAACAGTAGTAAATAGCTGAATAGCTATAATCTTGGATGCAGGCTA
TGTGCATCATCTCATCGATATCCATGCGGACCCTTTCTATTTCATACAGCTCGTGAAGGTCGAACACATTGTTATAAAAAAGG
GCGCACATAAGCCGCCACCGATGTAGATGGGTATACTTCTGATAAAAATAGTGGATGGCCTTTTTGAGGCCGTAGTCTACCGC
TATGGCGTACCAGTATTTGGTTAACATATTGCTGAAGGAGTTGTCATGGTCCAACATGTAGGTTATTTCCATGAGTCCCCTTA
GCTCCCACATGATTTCCTCCCTCAGATCCAAATCATCCACATGTTTCAGATTGGCGTTATTGGAAAACATTTCGTGGCATAAG
ATAATATTACTGTCGGTTTTGTTGCGCGTCGTATCAAAGAAAATTTTTAAAATATACTCTCTATCTAAACGGTCTTTGGCTCC
AAGTTCTCTACATAGATTGCGGGTGTGCTCCGAATGAGCACAAACCAGTCCATAATTAATATCGGCACCCCACTCAACAAACA
GCCTTATCAAGTCATGATTGTTTTCCTTCGCGGCTTTCATCAGTACGGTGTTCAATTCAATACCCTCGCTAAAACAGGTTGAC
TTTATAAACATTTTGTTACGATACGTATAAAATGTAATAGGGCCATCATACCACCACAACCCGCAGCATTTCAGGATATGATA
TTGATCTACCGGTATACACTGTTTGGCCAGCACTTTCTTGGATAGGGATTGCAAGGAAGGCAACAT
Ken06.Bus MGF 360 11L (NC_044946.1:24534-25595)
SEQ ID No. 87
TTATCTGCGTTCATAATCGAGAAAAACCACCATATTCTTTGAGTGATAATTTTTTAACATAGAATTTATCTTTTCCGGGTCGG
TCACGGCCGACAACAGGGAAATCACCGGGTTATAATGTTTTAATGATAAGGCATCGGCTATCAAATAATTTTCCTTTTGTATT
GCTAGGGCTTTGCCTTCTTCAAAGGCGTTGGCACCCAGGTCTATACAAAAGAACATGTTCCCGAGATTATAGTTTTGTATGGA
AACAAACATGGCTTGATTGATGTTGGCACCCATGATAAAACAGTAGTAAATAGTTGAATAGCTATAATCTTGGATGCAGGCTA
TGTGCATCATCTCATCGATATCCATGCGGATCCTTTCTATTTCATACAGCTCGTGAAGGTCGAACACATTGTTATAAAAAAGG
GCGCACATGAGCCGCCACCGATGTAGATGGGTATACTTCTGATAAAAATAGTGGATGGCCTTTTTGAGGCCGTAGTCTACCGC
TATGGCGTACCAGTATTTGGTTAACATGTTGCTGAAGGAGTTGTCATGGTCCAACATGTAGGTTATCTCCATGAGTCCCCTTA
GCTCCCACATGATTTCCTCCCTCAGGTCCAAATCATCCACATGTTTCAGATTGGGGTTATTGGAAAACATTTCGTGGCATAAG
ATAATATTACTGTCGGTTTTGTTGCGCGTCGTATCAAAGAAAATTTTTAAAATATACTCTTTATCTAAACGGTCTTTGGCCCC
TAGTTCTCTGCATAGATCGCGGGTGTGCTCCGAATGAGCACAAACCAGTCCATAATTAATATCGGCACCCCACTCAGTAAATA
ATTTTATTAGGTCATGATTGTTTTCCTTCGCGGCTTTCATCAGTACGGTGTTCAATTCAATACCCTCGCTAAAACAGGTTGAC
TTTATAAACATTTTGTTACGATACGTATAAAATGTAATAGGGCCATCATACCACCACAACCCGCAACTTTTCAGGATATGATA
TTGATCTACCGGTATACACTGTTTGGCCAGCACTTTTTTGGATAGGGATTGCAAGGAAGGCAACAT

[0234] In an embodiment the attenuated ASFV of the invention comprises a functional version of MGF 360 11L. Suitably the functional version of MGF 360 11L comprises the sequence of SEQ ID No. 75, 76, 77, 78, 79, 80, 81, 82, 83, 84, 85, 86 or 87. Suitably the functional version of MGF 360 11L comprises a sequence having at least 70%, at least 80%, at least 90% or at least 95% identity with SEQ ID No. 75, 76, 77, 78, 79, 80, 81, 82, 83, 84, 85, 86 or 87. Suitably the functional version of MGF 360 11L consists of the sequence of SEQ ID No. 75, 76, 77, 78, 79, 80, 81, 82, 83, 84, 85, 86 or 87.

### MGF 360 12L Gene Sequences

Georgia 2007/1 MGF 360 12L (LR743116.1:30355-31407)
SEQ ID No. 88
TCATCTTAAATCATAGGTAAGGAAGATCATCATATTTTTTGAAACGTAATTTTTTAACGCATGATCTATGATTTCAGGGTCCG
TGCTTTTAGGCAACGGGGTGGTGGCCGGACTATAAATCTTTAGGGATAAAATGTTCTTTATAAGCTCATACCCTTCCCCTAAA
GCTGTAGTACCCTCTTCGAAAACATCAGCCCCCAGATCTATACAAAAGAACATGTTTTCTATATTATAGTACTGTATTGAGCT
AAGCATGGCTTGATTGATGTTGGCGCCCAGGACATAGCAGTAGTACATGGTTGAAAGGTTGTGGTCTTTGATGCAGGCGATCC
GCATCATCTCTTCTATGTCCATATGGATCTTGTCCTTTTCATACGCCTCATGAAGGTCAAACACATTATTAAAACAAAGAGCA
CATGTTAACCGCCACGTATTCAGGTGTGTATATTTTTGGTAAAAATACTGTATGGCCTCTTTCAGGTTATAGCGTATGGCTAT
AGCGTACCAGTATTTGAGTAGTAATGTACTGAGCGAAAACTCATTATTTAGCAGATCGGTTTTTACTATTAACTCCCTTAACT
CCCAGAAAATTTCTATCCTCATTTTTATATTATTTACTTTTTGTAATATCGGATTGTTGGAAAACACCTCATGGCATAAAATA
ATGTTACTACTAGTTTTATGAAACTTTAGATCTATAAAAATTTGTAAAATTTCTTCTTCATTCAAGGTTTCCTTGGCACCTAG
CTCTCGACAGAGGTCCCAGGTGTGCTCCGTGTTGACAGATACCAGCCCGTAGTTGATGTCCGCCCCCCACTCTGCAAACAGTT
TTATAAGGTTGTAGTTGTTTTCCCTTACAGCCTTCACTAACGCCGTATTTAGGTTTAAGCCCTCTTTAATACCTGCTGATTTT
ATGAGCCTTAGGTTATGATCAAACGTGATCGGAGCATCATGCCACCATAGGTCATAACACTTTAAAAGATAATGTTGGTTCGT
GGGCACGCATTGTCCAGCCAACACCTTTTTGGTCAGAGATTGCAGGGAAGGCAACAT
China/2018/AnhuiXCGQ MGF 360 12L (MK128995.1:29384-30436)
SEQ ID No. 89
TCATCTTAAATCATAGGTAAGGAAGATCATCATATTTTTTGAAACGTAATTTTTTAACGCATGATCTATGATTTCAGGGTCCG
TGCTTTTAGGCAACGGGGTGGTGGCCGGACTATAAATCTTTAGGGATAAAATGTTCTTTATAAGCTCATACCCTTCCCCTAAA
GCTGTAGTACCCTCTTCGAAAACATCAGCCCCCAGATCTATACAAAAGAACATGTTTTCTATATTATAGTACTGTATTGAGCT
AAGCATGGCTTGATTGATGTTGGCGCCCAGGACATAGCAGTAGTACATGGTTGAAAGGTTGTGGTCTTTGATGCAGGCGATCC
GCATCATCTCTTCTATGTCCATATGGATCTTGTCCTTTTCATACGCCTCATGAAGGTCAAACACATTATTAAAACAAAGAGCA
CATGTTAACCGCCACGTATTCAGGTGTGTATATTTTTGGTAAAAATACTGTATGGCCTCTTTCAGGTTATAGCGTATGGCTAT
AGCGTACCAGTATTTGAGTAGTAATGTACTGAGCGAAAACTCATTATTTAGCAGATCGGTTTTTACTATTAACTCCCTTAACT
CCCAGAAAATTTCTATCCTCATTTTTATATTATTTACTTTTTGTAATATCGGATTGTTGGAAAACACCTCATGGCATAAAATA
ATGTTACTACTAGTTTTATGAAACTTTAGATCTATAAAAATTTGTAAAATTTCTTCTTCATTCAAGGTTTCCTTGGCACCTAG
CTCTCGACAGAGGTCCCAGGTGTGCTCCGTGTTGACAGATACCAGCCCGTAGTTGATGTCCGCCCCCCACTCTGCAAACAGTT
TTATAAGGTTGTAGTTGTTTTCCCTTACAGCCTTCACTAACGCCGTATTTAGGTTTAAGCCCTCTTTAATACCTGCTGATTTT
ATGAGCCTTAGGTTATGATCAAACGTGATCGGAGCATCATGCCACCATAGGTCATAACACTTTAAAAGATAATGTTGGTTCGT
GGGCACGCATTGTCCAGCCAACACCTTTTTGGTCAGAGATTGCAGGGAAGGCAACAT
Tengani 62 MGF 360 12L (AY261364.1:24540-25592)
SEQ ID No. 90
TCATCTTAAATCATAGGTAAGGAAGATCATCATATTTTTTGAAACGTAATTTTTTAACGCATGATCTATGATTTCAGGGTCCA
TGCTTTTAGGCAACGGGGTGGTGGCCGGACTATAAATCTTTAGGGATAAAATGTTCTTTATAAGCTCATACCCTTCCCCTAAA
GCTGTAGTACCCTCTTCGAAAACATCAGCCCCCAGATCTATACAAAAGAACATGTTTTCTATATTATAGTACTGTATTGAGCT
AAGCATGGCCTGATTGATGTTGGCGCCCAGGACATAGCAGTAGTACATGGTTGAAAGGTTGTGGTCTTTGATGCAGGCGATCC
GCATCATCTCTTCTATGTCCATATGGATCTTGTCCTTTTCATACGCCTCATGAAGGTCAAACACATTATTAAAACAAAGAGCA
CATGTTAACCGCCACGTATTCAGGTGTGTATATTTTTGGTAAAAATACTGTATGGCCTCTTTCAGGTTATAGCGTATGGCTAT
AGCGTACCAGTATTTGAGTAGTAATGTACTGAGCGAAAACTCATTATTTAGCAGATCGGTTTTTTCTATTAACTCCCTTAACT
CCCAGAAAATTTCTATCCTCATTTTTATATTATTTACTTTTTGTAATATCGGATTGTTGGAAAACACCTCATGGCATAAAATA
ATGTTACTACTAGTTTTATGAAACTTTAGATCTATAAAAATTTGTAAAATTTCTTCTTCATTCAAGGTCTCCTTGGCACCTAG
CTCTCGACAGAGGTCCCAGGTGTGCTCCGTGTTGACAGATACCAGCCCGTAGTTGATGTCCGCCCCCCACTCTGCAAACAGTT
TTATAAGGTTGTAGTTGTTTTCCCTTACAGCCTTTACTAACGCCGTATTTAGGTTTAAGCCCTCTTTAATACCTGCTGATTTT
ATGAGCCTTAGGTTATGATCAAACGTGATCGGAGCATCATGCCACCATAGGTCATAACACTTTAAAAGATAATGTTGGTTCGT
GGGCACGCATTGTCCAGCCAACACCTTTTTGGTCAGAGATTGCAGGGAAGGCAACAT
Warthog MGF 360 12L (AY261366.1:26036-27088)
SEQ ID No. 91
TCATCTTAAATCGTAGGTAAGGAAGATCATCATATTTTTTGAAACGTAATTTTTTAACGCATGATCTATAATTTCAGGGTCCG
TGCTTTTAGGCAACGGGGTGGTGGCCGGACTATAAATCTTTAGGGATAAAATGTTCTTTATAAGCTTATACCCTTCCCCTAAA
GCTATAGTGCCCTCTTCGAAAGCATCAGCCCCCAGATCCATACAAAAGAACATGTTTTCTATATTATAGTACTGTATTGAGGT
AAGCATGGCCTGATTGATGTTGGCGCCCAGGACATAGCAGTAGTACATGGTTGAAAGGTTGTGGTCTTTGATGCAGGCGATCC
GCATCATCTCTTCTATGTCCATATGGATCTTGTCCTTTTCATACGCCTCATGAAGGTCAAACACATTATTAAAACAAAGAGCA
CATGTTAACCGCCACGTATTCAGGTGTGTATATTTTTGGTAAAAATACTGTATGGCCTCTTTCAGGTTATAGCGTATGGCTAT
AGCGTACCAGTATTTGAGTAGTAATGCACTGAGCGAAAACTCATTATTTAGCAGATCGGTTTTTTCTATTAACTCCCTTAACT
CCCAGAAAATTTCTATCCTCATTTTTATATTATTTACTTTTTGTAATATCGGATTGTTGGAAAACACCTCATGGCATAAAATA
ATGTTACTACTAGTTTTATGAAACTTTAGATCTATAAAAATTTGTAAAATTTCTTCTTCATTCAAGGTCTCCTTGGCACCTAG
CTCTCGACAGAGGTCCCGGGTGTGCTCCGTGTTGACAGATACCAGCCCATAGTTGATGTTCGCCCCCCACTCTGCAAACAGTT
TTATAAGGTTGTAATTGTTTTCCCTTACAGCCTTCACTAACGCCGTATTTAGGTCTAAGCCCTCTTTAATGCCTGCTGATTTT
ATGAGCTTTAGGTTATGATCAAACGTGATCGGACCATCATGCCACCATAGGTCATAACACTTTAAAAGATAATGTTGGTTCGT
GGGCACGCATTGTCCAGCCAACACCTTTTTGGTCAGAGATTGCAGGGAAGGCAACAT
Warmbaths MGF 360 12L (AY261365.1:29294-30346)
SEQ ID No. 92
TCATCTTAAATCGTAGGTAAGGAAGATCATCATATTTTTTGAAACGTAATTTTTTACCGCATGATCTATGATTTCAGGGTCCG
TGCTTTTAGGCAACGGGGTGGTGGCCGGACTATAAATCTTTAGGGATAAAATGTTCTTTATAAGCTTATACCCTTCCCCTAAA
GCTATAGTACCCTCTTCGAAAGCATCAGCCCCCAGATCCATACAAAAGAACATGTTTTCTACATTATAGTACTGTATTGAGGT
AAGCATGGCCTGATTGATGTTGGCGCCCAGAACATAGCAGTAGTACATGGTTGAAAGGTTGTGGTCTTTGATGCAGGCGATCC
GCATCATCTCTTCTATGTCCATATAGATCTTGTCCTTTTCATACGCCTCATGAAGGTCAAACACATTATTAAAACAAAGAGCA
CATGTTAACCGCCATGTATTCAGGTGTGTATATTTTTGGTAAAAATACTGTATGGCCTCTTTCAGGTTATAGCGTATGGCTAT
AGCGTACCAGTATTTGAGTAGTAATGTACTGAGCGAAAACTCATTATTTAGCAGATCGGTTTTTTCTATTAACTCCCTTAACT
CCCAGAAAATTTCTATCCTCATTTTTATATTATTTACTTTTTGTAATATCGGATTGTTGGAAAACACCTCATGGCATAAAATA
ATGTTACTACTAGTTTTATGAAACTTTAGATCTATAAAAATTTGTAAAATTTCTTCTTCATTCAAGGTCTCCTTGGCACCTAG
CTCTCGACAGAGGTCCCGGGTGTGCTCCGTGTTGACAGATACCAGCCCATAGTTGATGTCCGCCCCCCACTCTGCAAACAGTT
TTATAAGGTTGTAGTTGTTTTCCCTTACAGCCTTCACTAACGCCGTATTTAGGTCTAAGCCCTCTTTAATGCCTGCTGATTTT
ATGAGCTTTAGGTTATGATCAAACGTGATCGGACCATCATGCCACCATAGGTCATAACACTTTAAAAGATAATGTTGGTTCGT
GGGCACGCATTGTCCAGCCAACACCTTTTTGGTCAGAGATTGCAGGGAAGGCAACAT
Pretorisuskop/96/4 MGF 360 12L (AY261363.1:30098-31150)
SEQ ID No. 93
TCATCTTAAATCGTAGGTAAGGAAGATCATCATATTTTTTGAAACGTAATTTTTTAACGCATGATCTATAATTTCAGGGTCCG
TGCTTTTAGGCAACGGGGTGGTGGCCGGACTATAAATCTTTAGGGATAAAATGTTCTTTATAAGCTTATACCCTTCCCCTAAA
GCTATAGTGCCCTCTTCGAAAGCATCAGCCCCCAGATCCATACAAAAGAACATGTTTTCTATATTATAGTACTGTATTGAGGT
AAGCATGGCCTGATTGATGTTGCCCCCCAGGACATAGCAGTAGTACATGGTTGAAAGGTTGTGGTCTTTGATGCAGGCGATCC
GCATCATCTCTTCTATGTCCATATGAATCTTGTCCTTTTCATACGCCTCATGAAGGTCAAACACATTATTAAAACAAAGAGCA
CATGTTAACCGCCACGTATTCAGGTGTGTATATTTTTGGTAAAAATACTGTATGGCCTCTTTCAGGTTATAGCGTATGGCTAT
AGCGTACCAGTATTTAAGTAGTAATGTACTGAGCGAAAACTCATTATTTAGCAGATCGGTTTTTTCTATTAACTCCCTTAACT
CCCAGAAAATTTCTATCCTCATTTTTATATTATTTACTTTTTGTAATATCGGATTGTTGGAAAACACCTCATGGCATAAAATA
ATGTTACTACTAGTTTTATGAAACTTTAGATCTATAAAAATTTGTAAAATTTCTTCTTCATTCAAGGTCTCCTTGGCACCTAG
CTCTCGACAGAGGTCCCAGGTGTGCTCCGTGTTGACAGATACCAGCCCATAGTTGATGTTCGCCCCCCACTCTGCAAACAGTT
TTATAAGGTTGTAGTTGTTTTCCCTTACAGCCTTCACTAACGCCGTATTTAGGTCTAAGCCCTCTTTAATGCCTGCTGATTTT
ATGAGCTTTAGGTTATGATCAAACGTGATCGGACCATCATGCCACCATAGGTCGTAACACTTTAAAAGATAATGTTGGTTTGT
GGGCACGCATTGTCCAGCCAACACCTTTTTGGTCAGAGATTGCAGGGAAGGCAACAT
Mkuzi 1979 MGF 360 12L (AY261362.1:31073-32125)
SEQ ID No. 94
TCATCTTAAATCATAGGAAAGGAAGATCATCATATTTTTTGAAAAGTAATTTTTTAACGCATGATCTATGATTTCAGGGTCCG
TGCTTTTAGGCAACGGGATGGTGGTCGGACTATAAATCTTTAGAGATAAAATGTTTTTTATAAGCTCATACCCTTCCCCTAAA
GCTGTAGTACCCTCTTCGAAAACATCAGCCCCCAGATCCATACAAAAGAACATGTTTTCTATATTATAGTACTGTATTGAGGT
AAGCATGGCCTGATTGATGTTGGCGCCCAACATATAGCAGTAGTACATGGTTGAAAGGTTGTGGTCTTTAATGCAGGCGATCC
GCATCATCTCTTCTATGTCCATATAGATCTTGTCCTTTTCATACGCCTCATGGAGGTCAAACACATTATTAAAACAAAGAGCA
CATGTTAACCGCCACGTATTCAGGTGTGTATATTTTTGGTAAAAATACTGTATGGCTTCTTTCAGGTTATAGCGTATGGCTAT
AGCGTACCAGTATTTGAGTAGCAATGTACTGAGCGAAAACTCATTATTTAGCAGATCGGTTTTTTCTATTAACTCCCTTAACT
CCCAAAAAATTTCTATCCTCATTTTTATATTATTTACTTTTTGTAATATCGGATTGTTGGAAAACACCTCATGGCATAAAATA
ATGTTACTACTAGTTTTATGAAACTTTAGATCTATAAAAATTTGTAAAATTTCTTTTTCATTCAAGGTCTCCTTGGCACCTAG
CTCTCGACAGAGGTCCCAGGTGTGCTCCGAGCTGACAGATACCAGCCCATAGTTGATGTCCGCCCCCCACTCTGCAAACAATT
TTATAAGGTTGTAGTTGTTTTCCTTTACAGCCTTCACCAACGCCGTATTTAGGTCTAAGCCCTCTTTAATGCCTGCTGATTTT
ATGAGCCTTAGGTTATGATCAAACGTGATCGGAGCATCATGCCACCATAGGTCATAATATTTTAAAAGATAATGTTGGTTCGT
GGGCACGCATTGTCCGGCCAACACCTTTTTGGTCAAAGATTGCAGGGAAGGCAACAT
L60 MGF 360 12L (NC_044941.1:23965-25017)
SEQ ID No. 95
TCATCTTAAATCATAGGAAAGGAAGATCATCATATTTTTTGAAAAGTAATTTTTTAACGCATGATCTATGATTTCAGGGTCCG
TGCTTTTAGGCAACGGGATGGTGGTCGGACTATAAATCTTTAGAGATAAAATGTTTTTTATAAGCTCATACCCTTCCCCTAAA
GCTGTAGTACCCTCTTCGAAAACATCAGCCCCCAGATCCATACAAAAGAACATGTTTTCTATATTATAGTACTGTATTGAGGT
AAGCATGGCCTGATTGATGTTGGCGCCCAACATATAGCAGTAGTACATGGTTGAAAGGTTGTGGTCTTTGATGCAGGCAATCC
GCATCATCTCTTCTATGTCCATATGGATCTTGTCCTTTTCATACGCCTCATGGAGGTCAAACACATTATTAAAACAAAGAGCA
CATGTTAACCGCCACGTATTCAGGTGTGTATATTTTTGGTAAAAATACTGTATGGCCTCTTTCAGGCTATAGCGTACGGCTAT
AGCGTACCAGTATTTGAGTAGTAATGTACTGAGCAAAAACTCATTATTTAGCAGATCGGTTTTTTCTATTAACTCCCTTAACT
CCCAGAAAATTTCTATCCTCAATTTCAGATTATTTACTTTTTGTAATATCGGATTGTTGGAAAACACCTCATGGCATAAAATA
ATGTTACTACTAGTTTTATGAAACTTTAGATCTATGAAAATTTGTAAAATTTCCTCTTCATTCAAGATCTCCTTGGCACCTAA
CTCTTGACAGAGGTCCCGGGTATGCTCCGTGTTGACAGATACCAGCCCATAGTTGATGTCCGCCCCCCACTCTGTAAATAGTT
TTATAAGGCTGTAGTTGTTTTCCCTTACAGCCTTTACTAACGCCGTATTTAGGTCTAAGCCCTCTTTAATGCCTGATGATTTT
ATGAGCCTTAGGTTATGATCAAACGTGATCGGAGCATTATACCACCATAGATCATAATATTTTAAAAGATAATGTTGGTTCGT
GGGCACGCATTGTCCAGCCAACACCTTTTTGGTCAAAGATTGCAGGGAAGGCAACAT
Benin 97/1 MGF 360 12L (NC_044956.1:23616-24668)
SEQ ID No. 96
TCATCTTAAATCATAGGAAAGGAAGATCATCATATTTTTTGAAAAGTAATTTTTTAACGCATGATCTATGATTTCAGGGTCCG
TGCTTTTAGGCAACGGGATGGTGGTCGGACTATAAATCTTTAGAGATAAAATGTTTTTTATAAGCTCATACCCTTCCCCTAAA
GCTGTAGTACCCTCTTCGAAAACATCAGCCCCCAGATCCATACAAAAGAACATGTTTTCTATATTATAGTACTGTATTGAGGT
AAGCATGGCCTGATTGATGTTGGCGCCCAACATATAGCAGTAGTACATGGTTGAAAGGTTGTGGTCTTTGATGCAGGCAATCC
GCATCATCTCTTCTATGTCCATATGGATCTTGTCCTTTTCATACGCCTCATGGAGGTCAAACACATTATTAAAACAAAGAGCA
CATGTTAACCGCCACGTATTCATGTGTGTATATTTTTGGTAAAAATACTGTATGGCCTCTTTCAGGCTATAGCGTACGGCTAT
AGCGTACCAGTATTTGAGTAGTAATGTACTGAGCAAAAACTCATTATTTAGCAGATCGGTTTTTTCTATTAACTCCCTTAACT
CCCAGAAAATTTCTATCCTCAATTTCAGATTATTTACTTTTTGTAATATCGGATTGTTGGAAAACACCTCATGGCATAAAATA
ATGTTACTACTAGTTTTATGAAACTTTAGATCTATGAAAATTTGTAAAATTTCCTCTTCATTCAAGATCTCCTTGGCACCTAA
CTCTTGACAGAGGTCCCGGGTATGCTCCGTGTTGACAGATACCAGCCCATAGTTGATGTCCGCCCCCCACTCTGTAAATAGTT
TTATAAGGCTGTAGTTGTTTTCCCTTACAGCCTTTACTAACGCCGTATTTAGGTCTAAGCCCTCTTTAATGCCTGATGATTTT
ATGAGCCTTAGGTTATGATCAAACGTGATCGGAGCATTATACCACCATAGATCATAATATTTTAAAAGATAATGTTGGTTCGT
GGGCACGCATTGTCCAGCCAACACCTTTTTGGTCAAAGATTGCAGGGAAGGCAACAT
Malawi Lil-20/1 (1983) MGF 360 12L (AY261361.1:27682-28731)
SEQ ID No. 97
TCATCTTAAATCGTAGGAAAGGAAGGTCATCATATTTTTTGATTTATAATTTTTTAACACATGATCTATTATTTCAGGGTCCG
TGTTTTTAGGTAACGGGGCAGTGGACGGACTATAGATCTTTAGGGATAAAATGTTCCTTATAAGCTCATACCCTTCCCCTACA
GGCATATTCTCTTCGAAAACATCAGCCCCCAGATCCATACAAAAGAACATGTTTTCTATATTATAGTACTGTATTGAGGCAAG
CATGGCCTGATTAATGTTGGCGCCCAGGACATAGCAGTAGTATATCGTTGAAAGGTTGTGGTCTTTGATGCAGGCTACTCGCA
TCATCTCTTCTAAGTCCATATAGATCTTGTCCTTTTCATACGCCTCATGAAGGTCAAACACATTATTAAAACAAAGAGCACAT
GTTAACCGCCACGTATTCAGGTGTGTATATTTTTGATAAAAATACTGTATGGCCTCTTTCAGGTTATAGCGTACGGCTATAGC
GTACCAGTATTTGAGTAATAATGTATTGAGTGAAAACTCATTATTTAACAGATCGGTTTTTTTTATTAACTCCCTTAACTCCC
AGAAAATTTCTATCCTCATTTTCAGATTATTTACTTTTTGTAATAACGGATTGTTGGAAAACACCTCATGGCATAAAATAATG
TTACTACTAGTTTTATAAAACTTTAGATCGATGAAAATTCGTAAAATTTCCTCTTCATTTAAGGTCTCCTTGGCGCCTAGCTC
TCTGCAGAGGTCCCGGGTGTGCTCCGTGTTGACAGATACCAGCCCGTAGTTGATGTCCGCCCCCCACTCTGTAAAAAGCTTTA
TAAGGTTGTAGTTGTTTTCCCTTACAGCCTTTACTAACGCCGTATTTAGGTCTAAGCCATCTTTAATGCCTGCTGATTTTATC
AGCCCTAGGTTATGATCAAACGTGATCGGAGAATCATACCACCATAGGTCGTAACACTTTAAAAGATAATATTGGTCCGTCGG
CAGGCATTGTCCAGCCAGTACCTTTTTGGTCAGAGATTGCAGGGAAGGCAACAT
Kenya 1950 MGF 360 12L (AY261360.1:33549-34604)
SEQ ID No. 98
TCATCTTAGATCATAAGTAAGGAAGACCATCATATTTTTTGAAAAGTAATTTTTTAACTCATGATCTATAATTTCAGGGTCCG
TGCTTTTAGGCAACGGGGTGGTGGCCGGGCTATAAATCTTTAGGGATAAAATATTCCTTATAGGCTCATACCCTTCCTGTCCC
ACTAGAGCCATACCCTCTTCAAAAGCATCGGCCCCCAGATCCATACAAAAGAATATGTTTTCTATATTATAGTACTGTATTGA
GGTAAGCATGGCCTGATTGATGTTGGCGCCCAGCATATAGCAGTAGTATATCGTTGAAAGGCTGTGGTCTTTGATGCAGGCTA
TCCGCATCATCTCTTCTAAATCCATACAGATCTTGTCCTTTTCATACGCCTCATGAAGGTCAAACACGTTATTAAAACAAAGA
GCACATGTTAATCGCCACGTATTCAGGTGCGTATATTTTTGGTAAAAATACTGTATGGCCTCTTTCAAGTTGTAGCGTACGGC
TATAGCGTACCAGTATTTGAGTAATAGTGTATTGAGCGAAAACTCATTATTTAGCAGATCGGTTTTTTCTATTATCTCCCTTA
ACTCCCAAAAAATTTCTATCCTCATTTTCAGGTTATTTACCTTTTTTAAAAGTAGATTATCGGAAAACACCTCATGACATAAG
ATAATGTTACTACTGGTTTTATGAAACTTTAAATCTATGAAAATTTGTAAAATATCCCCTTCATTTAAGGTCTTCTTGGCGCC
TAGCTCTCGACAGAGGTCCCAGGTGTGCTCCGTGTTGACAGATATCAGCCCGTAGTTGATGTTCGCTCCCCACTCCGTAAATA
GTTTTATAAGACTGTAGTTGTTTTCCTTTACAGCCTTCACTAATGCCATGTTTAGGTCTAAGCCTTCTTGAAGGCCTGCTGAT
TTTATCAGCCTTAGGTTATGATCAAACGTGATCGGAGCATTATTCCACCATAGATCGTAACACTTTAAAAGATAATGTTGGTC
CTCGGGCAGACATTGTCCAGCCAGCACCTTTTTGGTCAGAGATTGCAGGGAAGGCAACAT
Ken06.Bus MGF 360 12L (NC_044946.1:27428-28483)
SEQ ID No. 99
TCATCTTAGATCATAAGTAAGGAAGACCATCATATTTTTTGAAAAGTAATTTTTTAACGCATGATCTATAATTTCAGGGTCCG
TGCTTTTAGGCAATGGGGTAGTGGCCGGGCTATAAATCTTTAGGGATAAAATATTCCTTATAGGCTCATACCCTTCCTGTCCC
ACTAGAGCCATACCCTCTTCAAAAGCATCGGCCCCCAGATCCATACAAAAGAATATGTTTTCTATATTATAGTACTGTATTGA
GGTAAGCATGGCCTGATTGATGTTGGCGCCCAGCATATAGCAGTAGTATATTGTTGAAAGGTTGTGGTCTTTGATGCAGGCTA
TCCGCATCATCTCTTCTAAATCCATACAGATCTTGTCCTTTTCATACGCCTCATGAAGGTCAAACACGTTATTAAAACAAAGA
GCACATGTTAACCGCCACGTATTCAGGTGTGTATATTTTTGGTAAAAATACTGTATGGCCTCTTTCAAGTTGTAGCGTACGGC
TATAGCGTACCAGTATTTGAGTAATAGTGTATTGAGCGAAAACTCATTATTTAGCAGATCGGTTTTTTCTATTATCTCCCTTA
ACTCCCAAAAAATTTCTATCCTCATTTTCAGGTTATTTACCCTTTTTAAAAGTAAATTATCGGAAAACACCTCATGACATAAG
ATAATGTTACTACTGGTTTTATAAAATTTTAAATCTATGAAAATTTGTAAAATATCCCCTTCATTTAAGGTCTTCTTGGCGCC
TAGCTCTCGACAGAGGTCCCAGGTGTGCTCCGTGTTGACAGATATCAGCCCGTAGTTAATGTTCGCCCCCCACTCCGTAAATA
GTTTTATAAGACTGTAGTTGTTTTCCTTTACAGCCTTCACTAATGCCATGTTTAGGTCTAAGCCTTCTTGAATGCCTGCTAAT
TTTATCAGCCTTAGGTTATGATCAAACGTGATCGGAGCATTATTCCACCATAGATCGTAACACTTTAAAAGATAATGTTGGTC
CTCGGGCAGACATTGTCTAGCCAGCACCTTTTTGGTCAAAGATTGCAGGGAAGGCAACAT

[0236] In an embodiment the attenuated ASFV of the invention comprises a functional version of MGF 360 12L. Suitably the functional version of MGF 360 12L comprises the sequence of SEQ ID No. 88, 89, 90, 91, 92, 93, 94 95, 96, 97, 98 or 99. Suitably the functional version of MGF 360 12L comprises a sequence having at least 70%, at least 80%, at least 90% or at least 95% identity with SEQ ID No. 88, 89, 90, 91, 92, 93, 94 95, 96, 97, 98 or 99. Suitably the functional version of MGF 360 12L consists of the sequence of SEQ ID No. 88, 89, 90, 91, 92, 93, 94 95, 96, 97, 98 or 99.

### MGF 360 13L Gene Sequences

Georgia 2007/1 MGF 360 13L (LR743116.1:31568-32629)
SEQ ID No. 100
CTATAGTATATTATGAGAATATTCCCAAATGATGGATAAGTTTTTTGATTTATAATCTTTTAATAAACTGCTTATTTCTTCGG
GGTCCTTTAAGTTTAGTGGCAAGGAAGCATCTGAGCTGTAAATATCCAAAGCCAAACTATGGCTCAGAAAATTATAACCTTTT
TGTTCCGCTATGGCACGACCCTCTTCAAAGGCATTACCACCCAAATCTATACAGAAAAATATATTACCGATGTTATAATATTG
TACTGAAGTAAGCATAGCTTGGTTGATGTTGCCCCCCAGCGCGTAACAGTAATATATTGTTAATGGATTGTTATCCTTGGTAG
AAGCCAGACATATCATGTCATGGACGTCTATTTGGATGTTTTCCTTGTGGTACATCTCATGAAGCTCATATATTTTGTTATAA
TACAGGAGACATTTTAATCGCCATTCATTAAGATCCGTATATTTCTCATCTAGAAAACAAATGGCGTCCTTACAATCGTATTG
TACTGCTTTGGCGTACCAATACTTCACTAGTAAACCATTTAACTCGTCCGTTTCTTTTATTTCTATGAGCCCCCATAGTCTTT
TATAAATTAAGCCCCTTAATTGTATAACAAATTTGTTTTCTAAAATAGGATTATTCATAAAAATTTCATGGCACAAAATAATA
CTGCCGCTGGTTTTATTGTGCATTATCCTGGTAAAAATACGGAAAATATCGTTGTCCTCTAGAGTTTCTTTGGCGCCTAGCTG
TCTACACAACTCTCGGATGTGCTTCGTATTGATAGAAAGCAAACCATAGTTGATATTTGCGCCCCACTCTGTAAAGAGCTTTA
TCAGACTATAGTTGTTTTCCTTAACAGCTATTATTAATGCCACACGAAGGTCTATATCTTCTCCTAAAAATCCTGATTTTATT
TGTATTCGGCCACGATCCATACAAAGCTTGAGAGGAGCATCATGCCACCATAGGCCACAATATTTCAAAATGCAGTGTTCATC
TATTGACAAACACTGGCTGGCTATCGTCTTTTTGACGAGGGTCTGCAGAGAGAGCGGCAACGACAT
China/2018/AnhuiXCGQ MGF 360 13L (MK128995.1:30597-31658)
SEQ ID No. 101
CTATAGTATATTATGAGAATATTCCCAAATGATGGATAAGTTTTTTGATTTATAATCTTTTAATAAACTGCTTATTTCTTCGG
GGTCCTTTAAGTTTAGTGGCAAGGAAGCATCTGAGCTGTAAATATCCAAAGCCAAACTATGGCTCAGAAAATTATAACCTTTT
TGTTCCGCTATGGCACGACCCTCTTCAAAGGCATTACCACCCAAATCTATACAGAAAAATATATTACCGATGTTATAATATTG
TACTGAAGTAAGCATAGCTTGGTTGATGTTGCCCCCCAGCGCGTAACAGTAATATATTGTTAATGGATTGTTATCCTTGGTAG
AAGCCAGACATATCATGTCATGGACGTCTATTTGGATGTTTTCCTTGTGGTACATCTCATGAAGCTCATATATTTTGTTATAA
TACAGGAGACATTTTAATCGCCATTCATTAAGATCCGTATATTTCTCATCTAGAAAACAAATGGCGTCCTTACAATCGTATTG
TACTGCTTTGGCGTACCAATACTTCACTAGTAAACCATTTAACTCGTCCGTTTCTTTTATTTCTATGAGCCCCCATAGTCTTT
TATAAATTAAGCCCCTTAATTGTATAACAAATTTGTTTTCTAAAATAGGATTATTCATAAAAATTTCATGGCACAAAATAATA
CTGCCGCTGGTTTTATTGTGCATTATCCTGGTAAAAATACGGAAAATATCGTTGTCCTCTAGAGTTTCTTTGGCGCCTAGCTG
TCTACACAACTCTCGGATGTGCTTCGTATTGATAGAAAGCAAACCATAGTTGATATTTGCGCCCCACTCTGTAAAGAGCTTTA
TCAGACTATAGTTGTTTTCCTTAACAGCTATTATTAATGCCACACGAAGGTCTATATCTTCTCCTAAAAATCCTGATTTTATT
TGTATTCGGCCACGATCCATACAAAGCTTGAGAGGAGCATCATGCCACCATAGGCCACAATATTTCAAAATGCAGTGTTCATC
TATTGACAAACACTGGCTGGCTATCGTCTTTTTGACGAGGGTCTGCAGAGAGAGCGGCAACGACAT
Tengani 62 MGF 360 13L (AY261364.1:25753-26814)
SEQ ID No. 102
CTATAGTATATTATGAGAATATTCCCAAATGATGGATAAGTTTTTTGATTTATAATCTTTTAATAAACTGCTTATTTCTTCGG
GGTCCTTTAAGTTTAGTGGCAAGGAAGCATCTGAGCTGTAAATATCCAAAGCCAAACTATGGCTCAGAAAATTATAACCTTTT
TGTTCCGCTATGGCACGACCCTCTTCAAAGGCATTACCACCCAAATCTATACAGAAAAATATATTACCGATGTTATAATATTG
TACTGAAGTAAGCATAGCTTGGTTGATGTTGCCCCCCAGCGCGTAACAGTAATATATTGTTAATGGGTTGTTATCCTTGGTAG
AAGCCAGACATATCATGTCATGGACGTCTATTTGGATGTTTTCCTTGTGGTACATCTCATGAAGCTCATATATTTTGTTATAA
TACAGGAGACATTTTAATCGCCATTCATTAAGATCCGTATATTTCTCATCTAGAAAGCAAATGGCGTCCTTACACTCGTATTG
TACTGCTTTGGCGTACCAATACTTCACTAGTAAACCGTTTAACTCATCCGTTTCTTTTATTTCTATGAGCCCCCATAGTCTTT
TATAAATTAAGCCCCTTAATTGTATAGTAAATTTATCTTCTATATTAGGATTATTCATAAATATATCATGGCACAAAATAATA
CTGCCGCTGGTTTTATTGTGCATTATCTTGGTGAAAATACGGAAAATATCGTCGTCTTCTAGAGTTTCTTTGGCGCCTAGCTG
TCTACACAACTCTCGGATGTGCTTCGTATTGATAGAAAGCAAACTATAGTTGATATTTGCGCCCCACTCTGTAAAGAGCTTTA
TCAGACTATAGTTGTTTTCCTTAACAGCTATTATTAATGCTATATGGAGGTCTATATCTTCTCCTAAAAATCCTGATTTTATT
TGTATTTGGCCACGATCCATACAAAGCTTGAGGGGGACATCATGCCACCATAGGCCACAGTGTTTCAGAATGCAGTGTTCATC
TATCGACAAAGACTGGTTGGCTACCGTCTTTTTGACGAGGGTCTGCAGAGAGAGCGGTAATGACAT
Warthog MGF 360 13L (AY261366.1:27277-28338)
SEQ ID No. 103
CTATAGTATATTATGAGAATATTCCCAAATGATGGATAAGTTTTTTGATTTATAATCCTTTAATAAACTGCTTATTTCTTCGG
GGTCCTTTAAGTTTAGTGGCAAGGAAGCATCTGAGCTGTAAATATCCAAAGTCAAACTATGGCTTAGAAAATGATAACCTTTT
TGTTCCGCTATAGCACGACCCTCTTCAAAGGCATTACCACCCAAATCTATACAGAAAAATATATTACCGATGTTATAATATTG
TACTGAAGTAAGCATAGCTTGGTTGATGTTGCCCCCCAGGGCGTAACAATAATATATTGTTAATGGATTGTTATCCTTGGTAG
AAGCCAGACATATCATGTCATGGACGTCTATTTGGACTTTTTCCTTGTGGTACATCTCATGAAGCTCATATATTTTGTTATAA
TACAGGAGACATTTTAATCGCCATTCATTAAGATCCGTATATTTCTCATCTAGAAAGCAAATGGCGTCCTTACACTCGTATTG
TACTGCTTTGGCGTACCAATACTTCACTAGTAAATCGTTTAACTCATCCGTTTCTTTTATTTCTATGAGCCCCCATAGTCTTT
TACAAATTAAGCCCCTTAATTGTATAGTAAATTTGTTTTCTATATTAGGATTATTCATAAATATCTCATGGCACAAAATAATA
CGGCCGCTGGTTTTATTGTGCATTATCTTGGTGAAAATACGGAAAATATCGTTGTCCTCTAGAGTTTCTTTGGCACCTAGCTG
TCTACACAACTCTCGGATGTGCTCCGTATTGATAGAAAGCAAACTATAGTTGATATGTGCGCCCCATTCTGTAAAGAGCTTTA
TCAGACTATAGTTGTTTTCCTTAACAGCTATTATTAATGCTATATGGAGGTCTATATCTTCTCCTAAAAATCCTGATTTTATT
TGTATTTGGCCACGATCCATACAAAGCTTGAGGGGGACATCATGCCACCATAGGCCACAGTGTTTCAGAATGCAGTGTTCATC
TGTCGACAAACACTGGCTGGCTACCGTCTTTTTGACGAGGGTCTGCAGAGAGAGCGGCAACGACAT
Warmbaths MGF 360 13L (AY261365.1:30498-31559)
SEQ ID No. 104
CTATAGTATATTATGAGAATATTCCCAAATGATGGATAAGTTTTTTGATTTATAACCCTTTAATAAACTGCTTATTTCTTCGG
GGTCCTTTAAGTTTAGTGGCAAGGAAGCATCTGAGCTGTAAATATCCAAAGCCAAACTATGGCTTAGAAAATGATAACCTTTT
TGTTCCGCTATGGCACGACCCTCTTCAAAGGCATTACCACCCAAATCTATACAGAAAAATATATTACCGATGTTATAATATTG
TACTGAAGTAAGCATAGCTTGGTTGATGTTGCCCCCCAGGGCGTAACAGTAATATATTGTTAATGGATTGTTATCCTTGGTAG
AAGCCAGACATATCATGTCATGGACGTCTATTTGGACTTTATCCTTGTGGTACATCTCATGAAGCTCATATATTTTGTTATAA
TACAGGAGACATTTTAATCGCCATTCATTAAGACCCGTATATTTCTCATCTAGAAAGCAAATGGCGTCCTTACACTCGTATTG
TACTGCTTTGGCGTACCAATACTTCACTAGTAAATCGTTTAACTCATCCGTTTCTTTTATTTCTATGAGCCTCCATAGTCTTT
TACAAATTAAGCCCCTTAATTGTATAGTAAATTTGTTTTCTATATTAGGATTATTCATAAATATCTCATGGCACAAAATAATA
CGGCCGCTGGTTTTATTGTGCATTATCTTGGTGAAAATACGGAAAATATCGTTGTCCTCTAGAGTTTTTTTGGCACCTAGCTG
TCTACACAACTCTCGGATGTGTTCCGTATTGATAGAAAGCAAACTATAGTTGATATGTGCGCCCCATTCTGTAAAGAGCTTTA
TCAGACTATAGTTGTTTTCCTTAACAGCTATTATTAATGCTACATGGAGATCTATATCTTCTCCTAAAAATCCTGATTTTATT
TGTATTTGGCCACGATCCATACAAAGCTTGAGGGGGACATCATGCCACCATAGGCCACAGTGTTTCAGAATGCAGTGTTCATC
TGTCGACAAACACTGGCTGGCTACCGTTTTTTTGACGAGGGTCTGCAGAGAGAGCGGCAACGACAT
Pretorisuskop/96/4 MGF 360 13L (AY261363.1:31307-32368)
SEQ ID No. 105
CTATAGTATATTATGAGAATATTCCCAAATTATGGATAAGTTTTTTGATTTATAATCCTTTAAAAAACTGCTTATTTCTTCGG
GGTCCTTTAAGTTTAGTGGCAAGGAAGCATCTGAGCTGAAAATATCCAAAGCCAAACTATGGCTTAGAAAATTATAACCTTTT
TGTTCCGCTATGGCACGACCCTCTTCAAAGGCATTACCACCCAAATCTATACAGAAAAATATATTACCGATGTTATAATATTG
TATTGAAGTAAGCATAGCTTGGTTGATGTTGCCCCCCAGGGCGTAACAGTAATATATTGTTAATGGATTGTTATCCTTGGTAG
AAGCCAGACATATCATGTCATGGACGTCTATTTGGACTTTTTCCTTGTGGTACATCTCATGAAGCTCATATATTTTGTTAAAA
TACAGGAGACATTTTAATCGCCATTCATTAAGATCCGTATATTTCTCTTCTAGAAAGCAAATGGCGTCCTTACACTCGTATTG
TACTGCTTTGGCGTACCAATACTTCACTAGTAAATCGTTTAACTCATCCGTTTCTTTTATTTCTATGAGCCCCCATAGTCTTT
TACAAATTAAGCCCCTTAATTGTATAGTAAATTTGTTTTCTATATTAGGATTATTCATAAATATATCATGGCACAAAATAATA
CGGCCGCTGGTTTTATTGTGCATTATCTTGGTGAAAATACGGAAAACATCGTCGTCTTCTAGAGTTTCTTTGGCGCCTAGCTG
TCTACACAACTCTCGGATGTGCTCCGTATTAATAGAAAGCAAACTATAGTTGATATGTGCGCCCCATTCTGTAAAGAGCTTTA
TCAGACTATAGTTGTTTTCCTTAACAGCTATTATTAATGCTATATGGAGGTCTATATCCTCTCCTAAAAATCCTGATTTTATT
TGTATTTGGCCACGATCCATACAAAGCTTGAGGGGGACATCATGCCACCATAGGCCACAGTGTTTCAGAATGCAGTGTTCATC
TATCGACAAACACTGGCTGGCTACCGTCTTTTTGACGAGGGTCTGCAGAGAGAGCGGCAACGACAT
Mkuzi 1979 MGF 360 13L (AY261362.1:32286-33347)
SEQ ID No. 106
CTATAATATATTATGAGAATATTCCCAAATGATGGATAAGTTTTTTGATTTATAATCTTTTAATAAACTGCTTATTTCTTCGG
GGTCCTTTAAGTTTAATGGCAAGGAAGCATCTGAACTGTAAATATCCAAAGTCAAGCTATGGCTTAAAAAATTATAACCTTTT
TGTTCCGCTATGGCACGACCCTCTTCAAAGGCATTACCCCCCAAATCTATACAGAAAAATATATTACCGATGTTATAATATTG
TACTGAAGTGAGCATAGCTTGGTTGATGTTGCTCCCCAGGGCGTAACAGTAATATATTGTTAATAGATTGTTATCCTTGGCAC
AAGCCAGACATATCATGTCATGGACGTCTATTTGGACTTTTTTCTTGTGGTACATCTCATGAAGCTCATATATTTTGTTATAA
TACAGGAGACATTTTAATCGCCATTCGTTAAGATCCGTATATTTCTCATCTAGAAAGCAAATGGCGTTCTTACAAACGTATTG
TACTGCTTTGGCATACCAATACTTCACTAGTAAATCATTTAACTTGTCCGTTTCTTTTATTTCTATGAGCCCCCATAGTCTTT
TATAAATTAAGCCCCTTAATTGTATAACAAATTTGTTTTCTAAAATAGGATTATTCATAAAAATTTCATGGCACAAAATAATA
CTGCCGCTGGTTTTATTGTGCATTATCCTGGTGAAAATACGGAAAATATCGTTGTCCTCTAGAGTTTCTTTGGCGCCTAGCTG
TCTACACAACTCTCGGATGTGCTTCGTATTGATAGAAAGCAAACTATAGTTGATATTTGCGCCCCACTCTGTAAAGAGCTTTA
TCAGACTATAGTTGTTTTCCTTAACAGCTATTATTAATGCCACACGAAGGTCTATATCTTCTCCTAAAAATCCTGATTTTATT
TGTATTCGGCCACGATCCATACAAAGCTTGAGAGGAGCATCATGCCACCATAGGCCACAGTATTTCAAAATGCAGTGTTCATC
TATTGACAAACACTGGCTGGCTACCGTCTTTTTGACGAGGGTCTGCAGAGAGAGCGGCAACGACAT
L60 MGF 360 13L (NC_044941.1:25189-26250)
SEQ ID No. 107
CTATAATATATTATGAGAATATTCCCAAATGATGGATAAGTTTTTTGATTTATAATCTTTTAATAAACTGCTTATTTTTTCGG
GGTCCTTTAAGTTTAATGGCAAGGAAGCATCTGAACTGTAAATATCCAAAGTCAAGCTATGGCTTAAAAAATTATAACCTTTT
TGTTCCGCTATGGCACGACCCTCTTCAAAGGCATTACCACCCAAATCTATACAGAAAAATATATTACCGACGTTATAATATTG
TACTGAAGTGAGCATAGCTTGGTTGATGTTGCCCCCCAGGGCGTAACAGTAATATATTGTTAATAGATTGTTATCCTTGGCAC
AAGCCAGACATATCATGTCATGGACGTCTATTTGGACTTTTTTCTTGTGGTACATCTCATGAAGCTCATATATTTTGTTATAA
TACAGGAGACATTTTAATCGCCACTCGTTAAGATCCGTATATTTCTCATCTAGAAAGCAAATGGCGTTCTTACAAACGTATTG
TACTGCTTTGGCATACCAATACTTCACTAGTAAATCATTTAACTCGTCCGTTTCTTTTATTTCTATGAGCCCCCATAGTCTTT
TATAAATTAAGCCCCTTAATTGTATAACAAATTTGTTTTCTAACATAGGATTATTCATAAAAATTTCATGGCACAAAATAATA
CTGCCGCTGGTTTTATTGTGCATTATCCTGGTGAAAATACGGAAAATATCGTTGTCCTCTAGAGTTTCTTTGGCGCCTAGCTG
TCTACACAACTCTCGGATGTGCTTCGTATTGATAGAAAGCAAACTATAGTTGATATTTGCGCCCCACTCTGTAAAGAGCTTTA
TCAGACTATAGTTGTTTTCCTTAACAGCTATTATTAATGCCACACGAAGGTCTATATCTTCTCCTAAAAATCCTGATTTTATT
TGTATTCGGCCACGATCCATACAAAGCTTGAGAGGAGCATCATGCCACCATAGGCCACAGTATTTCAAAATGCAGTGTTCATC
TATTGACAAACACTGGCTGGCTACCGTCTTTTTGACGAGGGTCTGCAGAGAGAGCGGCAACGACAT
Benin 97/1 MGF 360 13L (NC_044956.1:24840-25901)
SEQ ID No. 108
CTATAATATATTATGAGAATATTCCCAAATGATGGATAAGTTTTTTGATTTATAATCTTTTAATAAACTGCTTATTTTTTCGG
GGTCCTTTAAGTTTAATGGCAAGGAAGCATCTGAACTGTAAATATCCAAAGTCAAGCTATGGCTTAAAAAATTATAACCTTTT
TGTTCCGCTATGGCACGACCCTCTTCAAAGGCATTACCACCCAAATCTATACAGAAAAATATATTACCGACGTTATAATATTG
TACTGAAGTGAGCATAGCTTGGTTGATGTTGCCCCCCAGGGCGTAACAGTAATATATTGTTAATAGATTGTTATCCTTGGCAC
AAGCCAGACATATCATGTCATGGACGTCTATTTGGACTTTTTTCTTGTGGTACATCTCATGAAGCTCATATATTTTGTTATAA
TACAGGAGACATTTTAATCGCCACTCGTTAAGATCCGTATATTTCTCATCTAGAAAGCAAATGGCGTTCTTACAAACGTATTG
TACTGCTTTGGCATACCAATACTTCACTAGTAAATCATTTAACTCGTCCGTTTCTTTTATTTCTATGAGCCCCCATAGTCTTT
TATAAATTAAGCCCCTTAATTGTATAACAAATTTGTTTTCTAACATAGGATTATTCATAAAAATTTCATGGCACAAAATAATA
CTGCCGCTGGTTTTATTGTGCATTATCCTGGTGAAAATACGGAAAATATCGTTGTCCTCTAGAGTTTCTTTGGCGCCTAGCTG
TCTACACAACTCTCGGATGTGCTTCGTATTGATAGAAAGCAAACTATAGTTGATATTTGCGCCCCACTCTGTAAAGAGCTTTA
TCAGACTATAGTTGTTTTCCTTAACAGCTATTATTAATGCCACACGAAGGTCTATATCTTCTCCTAAAAATCCTGATTTTATT
TGTATTCGGCCACGATCCATACAAAGCTTGAGAGGAGCATCATGCCACCATAGGCCACAATATTTCAAAATGCAGTGTTCATC
TATTGACAAACACTGGCTGGCTACCGTCTTTTTGACGAGGGTCTGCAGAGAGAGCGGCAACGACAT
Malawi Lil-20/1 (1983) MGF 360 13L (AY261361.1:28920-29980)
SEQ ID No. 109
TTAGAGTATATTATGAGAGTAATCCAAAATGATGGATAAATTTTTTGATTTATAATTTTTTAACAAACTGCTTATTTCTTCGG
GGTCCTTTAAGTTTAATGGCAAGGAAGCATCCGAGCTATAAATATTCAAAACCAAACTATGGCTTAGAAAATTATAACCTTTT
TGTCTCGCTATGGCACTACCCTCTTCAAAGGCATTACCACCCAAATCTATACAGAAATATATATTACCGATGTTATAATATTG
CACTGAAGTAAGCATAGCTTGGTTGATGTTGCCCCCCAGGGCATAACAGTAATATATTGTTAATGGATTGTTATCCCTGATAC
AAGCCAGGGATAACATTTCATTAACGTCTATTTGGATTTTTTCCTTGTGGTATATATCATGAAGCTCATATATTTTGTTATAA
TATAGGTAACATTTTAATCGCCATTCATTAAGATCCGTATATTTCTCATCCAGAAAGCAAATGGCATCTTTATAATCGTATTG
TACTGCTTTGGCGTACCAATATTTCACTAGTAATTCACTTAACTCGTCCGTTTCTTTTATTTCTATAAGCCCGCATAGTCTTT
TATAAATTAAGCGCCTTAATTGTGCAGCAAATTTGTTTTCTAAATTAGGATTATTTATAAATATCTCATGGCACAAAATAACA
CTGCCGCTGGTTTTATTATGCATTATCTTGTTGAAAATACAGAAAATATCGTAGTCCTCCAGAGTTTCTTTGGCGCCTAGCTG
TCTACACAAATCTCGGACGTGCTTCGTATTGATAGAAAGCAGACTATAGTTGATATTTGCGCCCAACTCTGTAAAAAGCTTTA
TTAGATTATAGTTGTTTTCCTTAACAGCTATTATTAATGCCACACAAAGGTCTATATCTTCTCCTAAAAATCCCGATTTTATT
TGTATTCGGCCACGATCCATATAAAGCTTGAGAGGGGCATCATGCCACCATAAGTCACAGTATTTCAAAATGTGTTCATCTAT
CGACAAACATGATGTACTGGCTACCGTCTTTTTGACGAGGGTTTGTAGAGAGAGCGGCGCCGACAT
Kenya 1950 MGF 360 13L (AY261360.1:34752-35812)
SEQ ID No. 110
TTAGAGTATTTTATGAGAGTAATCCAGAATGATGGATAAATTTTTTGATTTATAATTTTTTAATAAACTGCTTATTTCTTCGG
GAACCTTTAAGTTTAATGGCAAGGAAGCATCTGAGCTATAAATATTCAAAATTAAACTATGGCATAAAAAATTATAACCATTT
TGTCTCGCTATGGCACTACCCTCTTCAAAGGCATTACCACCCAAATCTATACAGAAATATATATTACCGATGTTATAATATTG
TACTGAAGTAAGCATAGCTTGGTTGATGTTGCCCCCCAGGGCATAACAATAATATATTGTTAATAGATTGTTATCCCTGATAC
AAGCCAGAGATAACATTTCATTGACGTCTATTTGGATTTTTTTCTTGTGGTATATATCATGAAGCTCATATATTTTGTTATAA
CATAGGTAACATTTTAATCGCCATTCATCAAGATCCGTATATTTTTCATCCAGAAAGCAAATGGCATCTTTATGATCGTATTG
TACTGCATTGGCGTACCAATATTTCACTAGTAATTCGCTTAACTCGTCCGTTTCTTTTATTTCTATAAGCCCGCATAATCTTT
TATAAATTAAGCGCCTTAATTGTGCAGCAAAGTTGTTTTCTAATTTAGGATTATTTATAAATATCTCATGGCACAAAATAATA
CTGCCGCTAGTTTTATTATGCATTATTTTATTGAAAATACAGAAAATATCGTAGTCGTCTAGAGTTTCTTTGGCGCCTAGCTG
TCTACACAAATCTCGGGCGTGCTTCGTATTGATAGAAAGCAGACTATAGTTGATATATGCGCCCCACTCTGTAAATAACTTTA
TCAGACTATAGTTATTTTCCTTAACAGCTATTATTAATGCCACACAAAGGTCTATATCTTCTCCTAGGAATCCCGATTTTATG
TATATTCGTCCACGATCTATGTAAAGCTTGAGGGGAGCATCATGCCACCATAAGCCACAGTATTTCAAAATGTGTTCATCTAT
CGACAAACATGATGTACTGGCTACCGTCTTTTTGACGAGGGTCTGCAGAGAGAGCGGCGACGACAT
Ken06.Bus MGF 360 13L (NC_044946.1:28644-29704)
SEQ ID No. 111
TTAGAGTATTTTATGAGAGTAATCCAGAATGATGGATAAATTTTTTGATTTATAATTTTTTAATAAACTGCTTATTTCTTCGG
GATCCTTTAAGTTTAATGGCAAGGAAGCATCTGAGCTATAAATATTCAAAACCAAACTATGGCTTAAAAAATTATAACCATTT
TGTCTCGCTATGGCACTACCCTCTTCAAAGGCATTACCACCCAAATCTATACAGAAATATATATTACCGATGTTATAATATTG
TACTGAAGTAAGCATAGCTTGATTGATGTTGCCCCCCAGGGCATAACAATAATATATTGTTAATAGATTGTTATCCCTGATAC
AAGCCAGAGATAACATTTCATTGACGTCTATTTGGATTTTTTCCTTGTGGTATATATCATGAAGCTCATATATTTTGTTATAA
CATAGGTAACATTTTAATCACCATTCATCAAGATCCGTATATTTTTCATCCAGAAAGCAAATGGCATCTTTATGGTCGTATTG
TACTGCATTGGCGTACCAATATTTCACTAGCAATTCGCTTAACTCGTCCGTTTCTTTTATTTCTATAAGCCCGCATAGTCTTT
TATAAATTAAGCGCCTTAATTGTGCAGCAAAGTTGTTTTCTAAATTAGGATTATTTATAAATATCTCATGGCACAAAATAATA
CTGCCGCTAGTTTTATTATGCATTATCTTGTTGAAAATACAGAAAATATCGTAGTCGTCTAGAGTTTCTTTGGCGCCTAGCTG
TCTACACAAATCTCGGGCGTGCTTCGTATTGATAGAAAGCAGACTATAGTTGATATATGCGCCCCACTCTGTAAATAACTTTA
TCATACTATAGTTGTTTTCCTTAACAGCTATTATTAATGCCACACAAAGGTCTATATCTTCTCCTAGGAATCCCGATTTTATG
TATATTCGCCCACGATCTATGTAAAGCTTGAGGGGAGCATCATGCCACCATAAGCCACAGTATTTCAAAATGTGTTCATCTAT
CGACAAACATGATGTACCGGCTACCGTCTTTTTGACGAGGGTCTGCAGAGAGAGCGGCGACGACAT

[0238] In an embodiment the attenuated ASFV of the invention comprises a functional version of MGF 360 13L. Suitably the functional version of MGF 360 13L comprises the sequence of SEQ ID No. 100, 101, 102, 103, 104, 105, 106, 107, 108, 109, 110 or 111. Suitably the functional version of MGF 360 13L comprises a sequence having at least 70%, at least 80%, at least 90% or at least 95% identity with SEQ ID No. 100, 101, 102, 103, 104, 105, 106, 107, 108, 109, 110 or 111. Suitably the functional version of MGF 360 13L consists of the sequence of SEQ ID No. 100, 101, 102, 103, 104, 105, 106, 107, 108, 109, 110 or 111.

### MGF 360 14L Gene Sequences

Georgia 2007/1 MGF 360 14L (LR743116.1:32814-33887)
SEQ ID No. 112
TTAGTCTATAACTATAATTTCTGGATGGGCTGTAAGATACTCTTCGGCTCGTTTCAGATTTTTTGAAGTATATGTCTTTAGCA
TATCATATATTTCCTGGGGTTCGGTTACATCTAATACCAAGGTCACATCACGGCTGAAAAGCTGCTTTACTAAGAAAATGTTG
CTCAAGTTATACATATAAGCTTTGTGCGCAATGAGTTGTGCCCTATCAAAATCGGCAGCCCCCAAATCAATACAGAAAAACAT
GTTTAAAGTATTATTGTTATAGATAGAAAGATTCATGCCATAATCGAGACTAGCCCCCAACCTATGACAGTAATAAATGGCCG
CGTAATTTTTTTCCCGCAAGCAAGCAAATTTCATCATCAGATTAGGGCTGATGCAAATCTCTTTTTCACGACACAACTCGTGT
ATGTCAAAAATGTTATTAAAATAAAGGCTACAAGCTACCCGCCAATAGAGGTGATTTTTATGCCTTTTATAGAAATAGTGAAT
AGCCTTTGTAAAATTATGTCGTAATGCCAGGGCAAACCAAAACTTTGTTAATAGGTGGTGCGCCGTATCCCCCGTCAACGGAA
TGTTTGAACAGGTGTACGTAACTGTGTCTAAAGTGGTTCTAGTTACGGTTTCCAAGAGTGGATTATGACAAAACATGTCATAA
CCCAGCAGAACTCCTGCACAGGATTTTAGCCTGGCCACTTCTTTTAAAATTTCCAGAAGACGGGGTTCGGATACAGGCGTTAA
GCCTCCCAGTTCCGCACACAGCCGCTTTAGATACACGGCAGGAACACGTATAAGCCCATATTCAGGATTTGCGCCCCAATCCA
CAAATAAACGTATAAGTTCAAGATTATCGCTCTTCACGGCCTTTACTAGCGCCGCTTCGAGACAAAGATCATCCTCAGAAAAA
CACTGTAAATGTTTATACGAAAAAACTTGCTTACAATTGTTACATAGGTGAATAGGACCTAAATCCCACCACAAACCAAAACG
CTGCAACGTATAATCATAGTCACTTGAAAGATAATTGCATGCCACAACTTTTTTGGCCAACGTTTGTAAAGACAACAT
China/2018/AnhuiXCGQ MGF 360 14L (MK128995.1:31843-32916)
SEQ ID No. 113
TTAGTCTATAACTATAATTTCTGGATGGGCTGTAAGATACTCTTCGGCTCGTTTCAGATTTTTTGAAGTATATGTCTTTAGCA
TATCATATATTTCCTGGGGTTCGGTTACATCTAATACCAAGGTCACATCACGGCTGAAAAGCTGCTTTACTAAGAAAATGTTG
CTCAAGTTATACATATAAGCTTTGTGCGCAATGAGTTGTGCCCTATCAAAATCGGCAGCCCCCAAATCAATACAGAAAAACAT
GTTTAAAGTATTATTGTTATAGATAGAAAGATTCATGCCATAATCGAGACTAGCCCCCAACCTATGACAGTAATAAATGGCCG
CGTAATTTTTTTCCCGCAAGCAAGCAAATTTCATCATCAGATTAGGGCTGATGCAAATCTCTTTTTCACGACACAACTCGTGT
ATGTCAAAAATGTTATTAAAATAAAGGCTACAAGCTACCCGCCAATAGAGGTGATTTTTATGCCTTTTATAGAAATAGTGAAT
AGCCTTTGTAAAATTATGTCGTAATGCCAGGGCAAACCAAAACTTTGTTAATAGGTGGTGCGCCGTATCCCCCGTCAACGGAA
TGTTTGAACAGGTGTACGTAACTGTGTCTAAAGTGGTTCTAGTTACGGTTTCCAAGAGTGGATTATGACAAAACATGTCATAA
CCCAGCAGAACTCCTGCACAGGATTTTAGCCTGGCCACTTCTTTTAAAATTTCCAGAAGACGGGGTTCGGATACAGGCGTTAA
GCCTCCCAGTTCCGCACACAGCCGCTTTAGATACACGGCAGGAACACGTATAAGCCCATATTCAGGATTTGCGCCCCAATCCA
CAAATAAACGTATAAGTTCAAGATTATCGCTCTTCACGGCCTTTACTAGCGCCGCTTCGAGACAAAGATCATCCTCAGAAAAA
CACTGTAAATGTTTATACGAAAAAACTTGCTTACAATTGTTACATAGGTGAATAGGACCTAAATCCCACCACAAACCAAAACG
CTGCAACGTATAATCATAGTCACTTGAAAGATAATTGCATGCCACAACTTTTTTGGCCAACGTTTGTAAAGACAACAT
Tengani 62 MGF 360 14L (AY261364.1:26983-28056)
SEQ ID No. 114
TTAGTCTATAACTATAATTTCTGGATGGGCTGTAAGATACTCTTCAGCTCGTTTCAGATTTTTTGAAGTATATGACTTTAGCA
TATCATATATTTCCTGGGGTTCGGTTACATCTAATGCCAAGGTCACATCACGGCTGAAAAGCTGCTTTACTAAGAAAATGTTG
CTCAAGTTATACATATAAGCTTTGTGCGCAATGCGTTGTGCCCTATCAAAATCAGTAGCCCCCAAATCGATGCAGAAAAACAT
GTTTAAAGTATTATTGTTATAGATAGAAAGATTCATGCCATAATCGAGACTAGCCCCTAACCTATAACAGTAATAAATGGCCG
CATAATTTTTTTTCTGCAAGCAAGCAAATTTCATCATCAGATTAGGGCTGATGCAAATCTCTTTTTCACGACACAACTCGTGT
ATGTCAAAAATGTTATTAAAATAAAGGCTACAAGCTACCCGCCAATAGAGGTGATTTTTATGCCTTTTATAGAAATAGTGAAT
AGCCTTTGTAAAATTATGTCGTAATGCCAGGGCAAACCAAAACTTTGTTAATAGGTGGTGCGCCGTATCCCCCGTCAACGGAA
TGTTTGAACAGGTGTACGTAACTGTGTCTAAAGTGGTTCTAGTTACGGTTTCCAAGAGTGGATTATGACAAAACATGTCATAA
CCCAGCAGAACTCCTGCACAGGATTTTAGCCTGGCCACTTCTTTTAAAATTTCCAGAAGACGGGATTCGGATACAGGCGTTAA
GCCACCCAGTTCCGTGCACAGCCGCTTTAGATGCACGGCAGGAACACGTATAAGTCCATATTCAGGATTTGCGCCCCAATCCA
CAAATAAACGTATAAGCTCAAGATTATCGCTCTTCACGGCCTTTACTAGCGCCGCTTCAAGACAAAGATCATCCTCAGAAAAA
CACTGTACATGTTTATACGAAAAAATTTGCTTACAATTATTACATAGGTGAATAGGACCTAAATCCCACCACAAACCAAAACG
CTGCAACGTATAATCATAGTCACTTGAAAGATAATTGCATGCCACAACCTTTTTGGCCAATGTTTGTAAAGACAACAT
Warthog MGF 360 14L (AY261366. 1:28495-29568)
SEQ ID No. 115
TTAGTCTATAACTATAATTTCTGGATGGGCTGTAAGATACTCTTCGGCTCGTTTCAGATTTTTTGAAGTATATGACTTTAGCA
TATCATATATTTCCTGGGGTTCGGTTACATCTAATGCCAAGGTCACATCACGGCTGAAAAGCTGCTTTACTAAAAAAATGTTG
CTCAAGTTATACATATAAGTTTTGTGCGCAATGCGTTGTGCCCTATCAAAATCAGTAGCCCCCAAATCGATGCAGAAAAACAT
GTTTAAAGTATTATTGTTATAGATAGAAAGATTCATGCCATAATCGAGACTAGCCCCTAACCTATAACAGTAATAAATGGCCG
CATAATTTTTTTTCCGCAAGCAAGCAAATTTCATCATCAGATTAGGGCTGATACAAATCTCTTTTTCACGACACAGCTCGTGT
ATGTCAAAAATGTTATTAAAATAAAGGCTACAAGCTACCCGCCAATAGAGGTGATTTTTATGCCTTTTATAAAAATAGTGAAT
AGCCTTTGTAAAATTATGTCGTAATGCCAGGGCAAACCAAAACTTTGTTAATAGGTGGTGCGCCGTATCCCCCGTCAACGGAA
TGTTTGAACAGGTGTACGTAACTGTGTCTAAAGTGGTTCTAGTTACGGTTTCCAAGAGTGGATTATGACAAAACATGTCATAA
CCCAGTAGAACTCCTGCACAGGATTTTAGCTTGGCCACTTCTTTTAAAATTTCCAGAAGACGGGGTTCGGATACAGGCGTTAA
GCCTCCCAGTTCCGTGCACAGCCGCTTTAGATGCACGGCAGGAACACGTATAAGTCCATATTCAGGATTTGCGCCCCAATCCA
CAAATAAACGTATAAGCTCAAGATTATCGCTCTTCACGGCCTTTACTAGCGCCGCTTCAAGACAAAGATCATCCTCAGAAAAA
CACTGTAAATGTTTATACGAAAAAATTTGCTTACAATTGTTACATAGGTGAATAGGACCTAAATCCCACCACAAACCAAAACG
CTGCAACATATAATCATAGTCACTTGAAAGATAATTGCATGCCACAACCTTTTTGGCCAACGTTTGTAAAGACAACAT
Warmbaths MGF 360 14L (AY261365.1:31747-32820)
SEQ ID No. 116
TTAGTCTATAACTATAATTTCTGGATGGGCTGTAAGATACTCTTCGGCTCGTTTCATATTTTTTGAAGTATATGCCTTTAGCC
TATCATATATTTCCTGGGGTTCGGTTACATCTAATGCCAAGGTCACATCACGGCTGAAAAGCTGCTTTACTAAAAGAATGTTG
CTCAAGTTATACATATAAGCTTTGTGCGCAATGCGTTGTGCCCTATCAAAATCAGTAGCCCCCAAATCGATGCAGAAAAACAG
GTTTAAAGAATTATTGTTATAGATAGAAAGATTCATGCCATAATCGAGACTAGCTCCCAACCTATAACAGTAATAAATGGCCG
CGTAATTTTTTTCCCGCAAGCAAGCAAATTTCATCATCAGATTAGGGCTAATGCAAATCTCTTTTTCACGACACAGCTCGTGT
ATGTCAAAAATGTTATTAAAATAAAGGCTACAAGCTACCCGCCAATAGAGGTGATTTTTATGCCTTTTATAGAAATAGTGAAT
AGCCTTTGTAAAATTATGTCGTAATGCCAGCGCAAACCAAAACTTTGTTAATAGGTGGTGCGCCGTATCCCCCATCAACGGAA
TTTTTGAACAGCTGTACATAACTGTGTCTAAAGTGGTTCTAGTTATGGTTTCCAAGAGTGGGTTATAACAAAACATGTCATAA
CCCAGTAGAACTCCTGCACAGGATTTTAGGTTGGCCACTTCTTTTAAAATTTCCAGAAGACGGGGTTCGGATACAGGTGTTAA
GCCTCCCAGTTCTGTGCACAGCCGCTTTAGATGCACGGTAGGAACACATATAAGTCCATATTCAGGATTTGCACCCCAATCCA
CAAATAAACGTATAAGCTCAAGATTATCCCTCTTCACGGCCTTTACTAGCGCCGCTTCAAGACAGAGATCATCCTCAGAAAAA
CACTGTAAATGTTTATACGAAAAAATTTGCTTACAATTGTTACACAGGTGAATAGGACCTAAATCCCACCACAAACCAAAACG
CTGCAACATATAATCATAGTCACTTGAAAGATAATTGCATGCCACAACCTTTTTGGCCAACGTTTGTAAAGACAACAT
Pretorisuskop/96/4 MGF 360 14L (AY261363.1:32525-33598)
SEQ ID No. 117
TTAGTCTATAACTATAATTTCTGGATGGGCTGTAAGATACTCTTCGGCTCGTTTCAGATTTTTTGAAGTATATGACTTTAGCC
TATCATATATTTCCTGGGGTTCGGTTACATCTAATGCCAAGGTCACATCACGGCTGAAAAGCTGCTTTACTAAGAAAATGTTG
CTCAAGTTATACATATAAGCTTTGTGCGCAATGTGTTGTGCCCTATCAAAATCAGTAGCCCCCAAATCGATGCAGAAAAACAT
GTTTAAAGTATTATTGTTATAGATAGAAAGATTCATGCCATAATCGAGACTAGCCCCTAACCTATAACAGTAATAAATGGCCG
CATAATTTTTTTTCTGCAAGCAAGCAAATTTCATCATCAGATTAGGGCTGATGCAAATCTCTTTTTCACGACACAGCTCGTGT
ATGTCAAAAATGTTATTAAAATAAAGGCTACAAGCTACCCGCCAATAGAGGTGATTTTTATGCCTTTTATAGAAATAGTGAAT
AGCCTTTGTAAAATTATGTCGTAATGCCAGGGCAAACCAAAACTTTGTTAATAGGAGGTGCGCCGTATCCCCCGTCAACGGAA
TGTTTGAACAGGTGTACGTAACTGTGTCTAAAGTGGTTCTAGTTACGGTTTCCAAGAGTGGATTATGACAAAACATGTCATAA
CCCAGTAGAACTCCTGCACAGGATTTTAGCTTGGCCACTTCTTTTAAAATTTCCAGAAGACGGGGTTCGGTTACAGGCGTTAA
GCCTCCCAGTTCCGTGCACAGCCGCTTTAGATGCACGGCAGGAACACGTATAAGTCCATATTCAGGATTTGCGCCCCAATCCA
CAAATAAACGTATAAGCTCAAGATTATCGCTCTTCACGGCCTTTACTAGCGCCGCTTCAAGACAAAGATCATCCTCAGAAAAA
CACTGTAAATGTTTATACGAAAAAATTTGCTTACAATTGTTACACAGGTGAATAGGACCTAAATCCCACCACAAACCAAAACG
CTGCAACGTATAATCATAGTCACTTGAAAGATAATTGCATGCCACAACCTTTTTGGCCAACGTTTGTAAAGACAACAT
Mkuzi 1979 MGF 360 14L (AY261362.1:33547-34620)
SEQ ID No. 118
TTAGTCTATAACTATAATTTCTGGATGGGCTGTAAGATACTCTTCGGCCCGTTTCATATTTTTTGAAGTATATGTCTTTAGCA
TATCATATATTTCCTGGGGTTCGGTTACATCTAATACCAAGGTCACATCACGGCTGAAAAGCTGCTTTACTAAGAAAATGTTG
CTCAAGTTATACATATAAGCTTTGTGCGCAATGAGTTGTGCCCTATCAAAATCGGCAGCCCCCAAATCAATACAGAAAAACAT
GTTTAAAGTATTATTGTTATAGATAGAAAGATTCATGCCATAATCGAGACTAGCCCCCAACCTATGACAGTAATAAATGGCCG
CGTAATTTTTTTCCCGCAAGCAAGCAAATTTCATCATCAGATTAGGGCTAATGCAAATCTCTTTTTCACGACACAGCTCGTGT
ATGTCAAAAATGTTATTAAAATAAAGGCTACAAGCTACCCGCCAATAGAGCTGATTTTTATGCCTTTTATAAAAATAGTGGAT
AGCCTTTGTAAAATTATGTCGTAATGCCAGGGCAAACCAAAACTTTGTTAATAGGAGGTGCGCCGTATCCCCCGTCAACGGAA
TGTTTGAACAGGTGTACGTAACTGTGTCTAAAGTGGTTCTAGTTACGGTTTCCAAGAGTGGATTATGACAAAACATGTCATAA
CCCAGTAGAACTCCTGCACAGGATTTTAGGTTGGCCACTTCTTTTAAAATTTCCAGAAGACGGGGTTCGGATACAGGCGTTAA
GCCTCCCAGTTCCGCACACAGCCGCTTTAGATACACGGCAGGAACACGTATAAGCCCATATTCAGGATTTGCGCCCCAATCCA
CAAATAAACGTATAAGTTCAAGATTATCGCTCTTCACGGCCTTTACTAGCGCCGCTTCAAGACAAAGATCATCCTCAGAAAAA
CACTGTAAATGTTTATACGAAAAAACTTGCTTACAATTGTTACATAGGTGAATAGGACCTAAATCCCACCACAAACCAAAACG
CTGCAACGTATAATCATAGTCACTTGAAAGATAATTGCATGCCACAACTTTTTTGGCCAACGTTTGTAAAGACAACAT
L60 MGF 360 14L (NC_044941.1:26422-27495)
SEQ ID No. 119
TTAGTCTATAACTATAATTTCTGGATGGGCTGTAAGATACTCTTCGGCTCGTTTCATATTTTTTGAAGTATATGTCTTTAGCA
TATCATATATTTCCTGGGGTTCGGTTACATCTAATACCAAGGTCACATCACGGCTGAAAAGCTGCTTTACTAAGAAAATGTTG
CTCAAGTTATACATATAAGCTTTGTGCGCAATGAGTTGTGCCCTATCAAAATCGGCGGCCCCCAAATCAATACAGAAAAACAT
GTTTAAAGTATTATTGTTATAGATAGAAAGATTCATGCCATAATCGAGACTAGCCCCCAACCTATGACAGTAATAAATGGCCG
CGTAATTTTTTTCCCGCAAGCAAGCAAATTTCATCATCAGATTAGGGCTAATGCAAATCTCTTTTTCACGACACAGCTCGTGT
ATGTCAAAAATGTTATTAAAATAAAGGCTACAAGCTACCCGCCAATAGAGCTGATTTTTATGCCTTTTATAAAAATAGTGGAT
AGCCTTTGTAAAATTATGTCGTAATGCCAGGGCAAACCAAAACTTTGTTAATAGGAGGTGCGCCGTATCCCCCGTCAACGGAA
TGTTTGAACAGGTGTACGTAACTGTGTCTAAAGTGGTTCTAGTTACGGTTTCCAAGAGTGGATTATGACAAAACATGTCATAA
CCCAGTAGAACTCCTGCACAGGATTTTAGGTTGGCCACTTCTTTTAAAATTTCCAGAAGACGGGGTTCGGATACAGGCGTCAA
GCCTCCCAGTTCCGCACACAGCCGCTTTAGATACACGGCAGGAACACGTATAAGCCCATATTCAGGATTTGCGCCCCAATCCA
CAAATAAACGTATAAGTTCAAGATTATCGCTCTTCACGGCCTTTACTAGCGCCGCTTCAAGACAAAGATCATCCTCAGAAAAA
CACTGTAAATGTTTATACGAAAAAACTTGCTTACAATTGTTACATAGGTGAATAGGACCTAAATCCCACCACAAACCAAAACG
CTGCAACGTATAATCATAGTCACTTGAAAGATAATTGCATGCCACAACTTTTTTGGCCAACGTTTGTAAAGACAACAT
Benin 97/1 MGF 360 14L (NC_044956.1:26073-27146)
SEQ ID No. 120
TTAGTCTATAACTATAATTTCTGGATGGGCTGTAAGATACTCTTCGGCTCGTTTCATATTTTTTGAAGTATATGTCTTTAGCA
TATCATATATTTCCTGGGGTTCGGTTACATCTAATACCAAGGTCACATCACGGCTGAAAAGCTGCTTTACTAAGAAAATGTTG
CTCAAGTTATACATATAAGCTTTGTGCGCAATGAGTTGTGCCCTATCAAAATCGGCGGCCCCCAAATCAATACAGAAAAACAT
GTTTAAAGTATTATTGTTATAGATAGAAAGATTCATGCCATAATCGAGACTAGCCCCCAACCTATGACAGTAATAAATGGCCG
CGTAATTTTTTTCCCGCAAGCAAGCAAATTTCATCATCAGATTAGGGCTAATGCAAATCTCTTTTTCACGACACAGCTCGTGT
ATGTCAAAAATGTTATTAAAATAAAGGCTACAAGCTACCCGCCAATAGAGCTGATTTTTATGCCTTTTATAAAAATAGTGGAT
AGCCTTTGTAAAATTATGTCGTAATGCCAGGGCAAACCAAAACTTTGTTAATAGGAGGTGCGCCGTATCCCCCGTCAACGGAA
TGTTTGAACAGGTGTACGTAACTGTGTCTAAAGTGGTTCTAGTTACGGTTTCCAAGAGTGGATTATGACAAAACATGTCATAA
CCCAGTAGAACTCCTGCACAGGATTTTAGGTTGGCCACTTCTTTTAAAATTTCCAGAAGACGGGGTTCGGATACAGGCGTCAA
GCCTCCCAGTTCCGCACACAGCCGCTTTAGATACACGGCAGGAACACGTATAAGCCCATATTCAGGATTTGCGCCCCAATCCA
CAAATAAACGTATAAGTTCAAGATTATCGCTCTTCACGGCCTTTACTAGCGCCGCTTCAAGACAAAGATCATCCTCAGAAAAA
CACTGTAAATGTTTATACGAAAAAACTTGCTTACAATTGTTACATAGGTGAATAGGACCTAAATCCCACCACAAACCAAAACG
CTGCAACGTATAATCATAGTCACTTGAAAGATAATTGCATGCCACAACTTTTTTGGCCAACGTTTGTAAAGACAACAT
Malawi Lil-20/1 (1983) MGF 360 14L (AY261361.1:30193-31266)
SEQ ID No. 121
TTAGTCTATAACTACAATTTCTGGATGGGCTGTAAAATACTCTTCGGCTTGTTTTAGATTTTTTGACGTATATGTATTTAGCA
TATCATATATTGCCTGGGGCTCAGTTAGATCTAATATCAAGCTCACATCACGGCTGAAAAGCTGTTTTACTAAAAAAAGGTTG
CTCAAGTTATACATATAAACTCTACGCGCAATGAGTCGCGCCCTATCAAAGTTAGTAGCCCCCAAATCAATGCAGAAAAATAG
GTTTAAAGTATTATTGTTATAGATAGATAGATTCATGCCATAATCAAGACTAGCCCCTAACATATGACAGTAATAAATGGCTG
CATAATTTTCTTCCCGCAAGCAAGCAAATTTCATCATCAGATTAGGGCTAATGCAAATCTCTTTTTTACAACACAGCTCATGC
AAGTCAAAAATGTTGTTAAAATAAAGGCTACAAGTCAGTCGCCAATAGAGCTGATTTTTATGCTTTTCGTAGAAATAGTGAAT
AGCTTTTGTAAAATTATGTCGTAATGCCAGGGCAAACCAAAACTTTGATAATAGGAGGTGCGCCGTATCCCCCGTCAACGGAA
TTTTTGAACGGGTGTACATAACTGTGTCTAAGGTGGTTCTAGTCACGGTTTCCAAGAGTGGATTATGACAAAACATGTCATAA
CCCAGTAGAACTCCTGCACAGGATTTCAGATCGGCCACTTCTTTTAAAATCTCCAGAAGACGAGATTCGGATACAGGTGTTAA
GCCTCCTAGTTCCATGCACAGCCGCTTTAGATGCACGGCAGGAACACGTATAAGTCCATATTCAGGATTTGCGCCCCAATCCA
CAAACAATCGTATAAGCTCAAGATTATCGCTCTTCACGGCCTTTACTAGCGCCGCTTCAAGACAAAGATCATCCTCAGAAAAA
CACTGTAAATGTTTATATGAAAAAATTTGCTTACATGTATTACATAAGTGAATAGGACCTAAATCCCACCACAAACCAAAACG
CTGCAGCGTATAATCATAATCACTTGAAAGATAATTGCATGCCACAACTTTTTTGGCCAGCGTTTGTAAAGACAACAT
Kenya 1950 MGF 360 14L (AY261360.1:36121-37194)
SEQ ID No. 122
TTAGTCTATAACTACAATTTCTGGATGGGCTGTAAAATACTCTTCGGCTCGTTTTAGATTTTTTGACGTATATGTCTTTAGCA
TATCATATATTGCCTGGGGTTCGGTTATATTTAATACCAAGCTCGCATCACGGCTGAAAAGCTGTTTTACTAAAAAAATGTTG
CTCAAGTTATACATATAAACTCTATGCGCAATGAGTCGCGCTCTATCAAAGTTAGTAGCCCCCAAATCAATACAGAAAAATAG
GTTTAAAGTATTATTGTTATAGATAGATAGATTCATGCCATAATCGGGACTAGCCCCCAACATATGACAGTAATAAATGGCTG
CATAATTTTCTTCCCGCAGGCAAGCAAATTTCATCATTAGATTAGGGCTAATGCAAATCTCTTTTTTAGAACACAGCTCATGC
AAGTCAAAAATATTATTAAAATAAAGGCTACAAGCCAGCCGCCAATAGAGCTGATTTTTATGCTTTTCATAGAAATAGTGAAT
CGCTTTTGTAAAATTATGTCGTAATGCCAGGGCAAACCAAAACTTCGTTAATAGGAGGTGCGCCGTATCCCCCGTCAACGGAA
TTTTTGAACGGGTGTACATAACGGTGTTTAAAGTGGTTCTAGTCACGGTTTCCAAGAGTGGATTATGACAAAACATGTCATAA
CCCAGTAGAACTCCTGCACAGGATTTCAGATCGGCCACTTCTTTTAAAATTTCCAGAAGACGAGATTCGGAGACAGGTGTTAA
GCCTCCTAGTTCTGTGCACAGCCGTTTTAGATCCACGGCAGGAACACGTATAAGTCCATATTCAGGATTTGCGCCCCAATCCA
CAAACAATCGTATAAGCTCAAGATTATCGCTCTTCACGGCCTTTACTAGCGCCGCGTCAAGACAAAGATCATCCTCAGAAAAA
CACTGCAAATGTTGATACGAAAAAATTTGCTTACATGTATTACATAAGTGAATAGGACCTAAATCCCACCACAAACCAAAACG
CTGCAGCGTATAATCATAGTCACTTGAAAGATAATTGCATGCCACAACCTTTTTGGCCAACGTTTGTAAAGACAACAT
Ken06.Bus MGF 360 14L (NC_044946.1:29917-30990)
SEQ ID No. 123
TTAGTCTATAACGACAATTTCTGGATGGGCTGTAAAATACTCTTCGGCTCGTTTTAGATTTTTTGACGTATATGTCTTTAGCA
TATCATATATTGCCTGGGGTTCGGTTATATTTAATACCAAGCTCGCATCACGGCTGAAAAGCTGTTTTACTAAAAAAATGTTG
CTCAAGTTATACATATAAACTCTATGCGCAATGAGTCGCGCTCTATCAAAGTTAGTAGCCCCCAAATCAATGCAGAAAAATAG
GTTTAAAGTATTATTGTTATAGATAGATAGATTCATGCCATAATCGGGACTAGCCCCCAACATATGACAGTAATAAATGGCTG
CATAATTTTCTTCCCGCAGGCAAGCAAATTTCATCATTAGATTAGGGCTAATGCAAATCTCTTTTTTAGAACACAGCTCATGC
AAGTCAAAAATGTTATTAAAATAAAGGCTACAAGTTAGCCGCCAATACAGCTGATTTTTATGTTTTTCGTAGAAATAGTGAAT
CGCTTTTGTAAAATTATGCCGTAATGCCAGGGCAAACCAAAACTTCGTTAATAGGAGGTGCGCCGTATCCCCCGTCAACGGAA
TTTTTGAACGGGTATACATAACTGTGTTTAAAGTGGTTCTAGTCACGGTTTCCATAAGTGGATTATGACAAAACATGTCATAA
CCCAGTAGAACTCCTGCACAGGATTTCAGATCGGCCACTTCTTTTAAAATTTCCAGAAGACGAGATTCGGAGACAGGTGTTAA
GCCTCCTAGTTCCGTGCACAGCCGTTTTAGATGCACGGCAGGAACACGTATAAGTCCATATTCAGGATTTGCGCCCCAATCCA
CAAACAATCGTATAAGCTCAAGATTATCGCTCTTCACGGCCTTTACTAGCGCCGCGTCAAGACAAAGATCATCCACAGAAAAA
CACTGCAAATGTTGATACGAAAAAATTTGCTTACATGTATTACATAAGTGAATAGGACCTAAATCCCACCACAAACCAAAACG
CTGCAGCGTATAATCATAGTCACTTGAAAGATAATTGCACGCCACAACTTTTTTGGCCAACGTTTGTAAAGACAACAT

[0240] In an embodiment the attenuated ASFV of the invention comprises a functional version of MGF 360 14L. Suitably the functional version of MGF 360 14L comprises the sequence of SEQ ID No. 112, 113, 114, 115, 116, 117, 118, 119, 120, 121, 122, or 123. Suitably the functional version of MGF 360 14L comprises a sequence having at least 70%, at least 80%, at least 90% or at least 95% identity with SEQ ID No. 112, 113, 114, 115, 116, 117, 118, 119, 120, 121, 122, or 123. Suitably the functional version of MGF 360 14L consists of the sequence of SEQ ID No. 112, 113, 114, 115, 116, 117, 118, 119, 120, 121, 122, or 123.

### MGF 360 21R Gene Sequences

Georgia 2007/1 MGF 360 14L
SEQ ID No. 124
ATGTCTACTCCACTTTCTCTACAGACTCTTGTTAAAAAAGTGCTGGCCACACAGCACATATCTAAAGAACACTACTTTATTTT
GAAATATTGTGGTTTATGGTGGCATGAAGCGCCGATTACGATTTGCATTGATGAGGATAGCCAAATATTGATAAAATCGGCAA
GCTTCAAAGAAGGCTTATCTTTAGATATCGCATTAATGAAAGTCGTGCAAGAAAATAACCATGATTTAATAGAGTTGTTTACC
AAGTGGGGTGCAGATATCAACTCTAGCTTAGTTACTGTTAATACGGAGTATACCCGGAACCTTTGTCAGAAATTAGGCGCAAA
GGAAGCTTTGAATGAAAGGGATATTTTACAAATATTTTATAAAACACGTCATCTTAAAACTAGCAGTAATATTATTTTATATA
ATGAATTGTTTTCTAATAATCTCCTTTTCCAAAATATAGAGAGATTGAGTTTAATAGTTTATAGGGGCTTGAAAAACTTATCA
ATCAACTTTATATTGGATGATATTTCATTTAGCGAAATGTTAACTAGATACTGGTATAGTATGGCGATATTATATAACCTTAC
TGAAGCCATCCAATATTTTTATCAACGATATAGGCATTTTAAAGATTGGCGGCTTATATGTGGGCTTTCTTTTAACAATTTGT
CTGACCTTCATGAAGTATATAACTTAGAGAAGACGGATATAGACATTGATGAAATGATGAAGTTGACCTGTAGTACGTATGAT
GGTAATTATTCGACTATTTATTATTGTTTTATGTTGGGGGCTGACATCAATCGGGCAATGTTAACCTCGGTAATAAACTTTCA
TATTGGTAACTTGTTCCTTTGTATAGATTTAGGAGCTGATGCTTTCGAAGACAGCATGGAACTAGCAAAACAAAAGAATAATA
ATATATTAGTAGAAATATTATCATTTAAAAATTATTATAGTTCAAATACCTCTCTTTTATCAATAAAAACGACAGATCCGGAA
AAAATTAATGCCTTATTAGATGAAGAAAAGTATGAGTCAAAAAATATGTTAATGTATGAAGAATTATCTCATTGA
China/2018/AnhuiXCGQ MGF 360 14L
SEQ ID No. 125
ATGTCTACTCCACTTTCTCTACAGACTCTTGTTAAAAAAGTGCTGGCCACACAGCACATATCTAAAGAACACTACTTTATTTT
GAAATATTGTGGTTTATGGTGGCATGAAGCGCCGATTACGATTTGCATTGATGAGGATAGCCAAATATTGATAAAATCGGCAA
GCTTCAAAGAAGGCTTATCTTTAGATATCGCATTAATGAAAGTCGTGCAAGAAAATAACCATGATTTAATAGAGTTGTTTACC
AAGTGGGGTGCAGATATCAACTCTAGCTTAGTTACTGTTAATACGGAGTATACCCGGAACCTTTGTCAGAAATTAGGCGCAAA
GGAAGCTTTGAATGAAAGGGATATTTTACAAATATTTTATAAAACACGTCATCTTAAAACTAGCAGTAATATTATTTTATATA
ATGAATTGTTTTCTAATAATCTCCTTTTCCAAAATATAGAGAGATTGAGTTTAATAGTTTATAGGGGCTTGAAAAACTTATCA
ATCAACTTTATATTGGATGATATTTCATTTAGCGAAATGTTAACTAGATACTGGTATAGTATGGCGATATTATATAACCTTAC
TGAAGCCATCCAATATTTTTATCAACGATATAGGCATTTTAAAGATTGGCGGCTTATATGTGGGCTTTCTTTTAACAATTTGT
CTGACCTTCATGAAGTATATAACTTAGAGAAGACGGATATAGACATTGATGAAATGATGAAGTTGACCTGTAGTACGTATGAT
GGTAATTATTCGACTATTTATTATTGTTTTATGTTGGGGGCTGACATCAATCGGGCAATGTTAACCTCGGTAATAAACTTTCA
TATTGGTAACTTGTTCCTTTGTATAGATTTAGGAGCTGATGCTTTCGAAGACAGCATGGAACTAGCAAAACAAAAGAATAATA
ATATATTAGTAGAAATATTATCATTTAAAAATTATTATAGTTCAAATACCTCTCTTTTATCAATAAAAACGACAGATCCGGAA
AAAATTAATGCCTTATTAGATGAAGAAAAGTATGAGTCAAAAAATATGTTAATGTATGAAGAATTATCTCATTGA
Tengani 62 MGF 360 14L
SEQ ID No. 126
ATGTCTACTCCACTTTCTCTACAGACTCTTGTTAAAAAAGTGCTGGCCACACAGCACGTATCTAAAGATCACTACTTTATTTT
AAAATATTGTGGTTTGTGGTGGCATAAGGCCCCGATTACGATTTGCATTGATGAGGATAGCCAAATATTGATAAAATCGGCAA
GCTTTAAAGAAGGCTTACCTTTAGATATGGCATTAATGAAAGCTGTACAGGAAAACAACTATGAAATGATCATGTTGTTTACT
GAGTGGGGTGCAGACATTAACTCTAGCTTAGTCACTGTTAATACGGAGCGTACCCGGAACCTTTGTCGAGAATTAGGCGCGAA
GGAAATTTTGAATGAAAAAGAAATTTTAGAAATATTTTATAAAACATGTCATATTAAAACTAGCAGTAATTTTATTCTATGCC
ATGAATTGTTATCCAATAATCCCCTTTTCCAAAATATAGAGAGTTTGAGTTTAATAGTTTATAGGGGCTTGAAAAACTTATCA
ATTAACTTTATATTGGATGATATTTCATTTAGCGAAATGTTAACTAGATACTGGTATAGCTGGGCGATATTATATAACCTTAC
TGAAGCTATTCAATATTTCTATCAAACATACAAGCATTTTAAAGATTGGCGGCTAATATGTGGACTTGCTTATAATAACGTGT
TTGATCTTCATGAAATTTATAACATAGAAAAGACTGATTTAGATATTGATGAAATGATGCAGTTGGCTTGTATGTATGATAGT
AATTATTCAACTATTTATTATTGTTTTATGTTGGGGGCTAATATCAATCAGGCAATGTTAACCTCGGTAATAAACCATTATAT
TAATAACTTGTTCCTTTGTATAGATTTGGGAGCTGACGCCGTCAAAGACAGCATGGAACTAGCAAAACAAAAGAATTATAATA
TATTAGTAAAAATATTAACATTTAAAAATTATAGTCCAGACTCTTCTCTTTTATCATTAAAAACGACAGATCCGGAAAAAATT
AATGCCTTACTAGATGAAGAAAAGTATGAGTCGAAAAATATGTTAATGTATGAAGAATCATCTCGTTGA
Pretorisuskop/96/4 MGF 360 14L
SEQ ID No. 127
ATGCCTTCTCCACATTCTCTACAGACTCTTGCTAAAAAAATACTGGCTACACAGCAGATATCTACAGATCACTACTTTATTTT
AAAATATTGTGGTTTATGGTGGCATGGAGCTCCAATTATGCTTTCTACTAATGAGGATAATCAATTGATGATAAAATCGGCAA
GCTTCAAAGAAGGCTTATCTTTAGATTTGGCATTAATGAAAGTCGTGCAAGAAAACAATCATGATTTAATAAAGCTGTTTACC
GAGTGGGGTGCAGACATCAACTCTAGCTTCGTCACTGTTAATATGGAGTGTACCCGAAACCTCTGTCGGGAATTAGGCGCGAA
GGAAGCTTTGAATGAAAGGGATATTTTACAAATATTTTATAAAACACGTGATATTAAAACTAGCAGTCATGTTATTTTATGCC
ATGAATTATTATCCAATAACCCCCTTTTCCAGAATATAGAGAGAATGCGTTCAATAATTTATAGGAGTCTGGAAAAACTATCA
ATCAACTTTATATTGGATGATATTTCATTTAGTGAAATGTTAACTAGACACTGGTATGGGTTGGCGATATTATATAACCTAAC
TGAAGCTATCCAATATTTCTATGAAAAATACAAGCATTTTAAAAATTGGCGGCTAATATGTGGACTTTCTTTTAACAATCTGT
CTGATCTTTATGAAATATATAATTTAGAGAAGGTTGATATGAACATTGATGAAATGATGTATCTGGCCTGTAGTATATATGAT
GGTAATTATTCAACTATTTATTATTGTTTTGTATTGGGAGCTGATATCAATCAGGCAATGTTAACCTCAGTAATAAACCATTG
TATTGGTAACTTGTTCCTTTGTATAGATTTAGGGGCTGATGCTTTCGAAGACAGCATGGAACTAGCAAAGCAAAAAAATGATA
ATATTTTTATTAGTATATTATCATTTAAAAATTACAGTCCAGACTCTTCTCTTTTGTCATTAAAAATGACAGATCCGGAAAAA
ATTAATGCCTTACTAGATGAAGAAAAGTATGAGTCAAAAAATATGTTAATGTTTGA
Mkuzi 1979 MGF 360 14L
SEQ ID No. 128
ATGCCTACTCCACTTTCTCTACAGACTCTTGCTAAAAAAGTACTGGCCACACAGTATATATCCATAGATTATTACTTTATTTT
GAAATATTGTGGTTTATGGTGGCATGGAGCCCCTATTATGATTTCCATTGATAAGAATAAAAGCCAAATACTGATAAAATCGG
CAAGCTTCAAAGAAGGCTTATCTTTAGATATCGCATTAATGAAAGCTGTGCAGGAAAACAATCATGATTTAATAAAGCTGTTT
ACCGAGTGGGGTGCAGACATCAACTCTAGCTTAGTCACTGTTAATACGGAGTGTACCCGAAACCTCTGTCGGGAATTAGGCGC
GAAGGAAGCTTTGAATGAAAGGGATATTTTACAAATATTTTATAAAACACGTGATATTAAAACTAGCAGTAATGTTATACTAT
GCCATGAATTGTTATCCAATAACCCCCTTTTCCAAAATATAGAGAGAATGCGTTCAATAATTTATAGGAGTCTGGAAAAACTA
TCAATTAACTTTATATTGGATGATATTTCATTTAGCGAAATGTTAACTAGACACTGGTATAGGTTGGCGATATTATATAACCT
AACTGAAGCTATCCAATATTTCTATGAAAAATACAAGCATTTTAAAGATTGGCGGCTAATATGTGGGCTTTCTTTTAACAATC
TGTCTGACCTTCATGAAATATATAACTTAGAGAAGGTTGATATGGACATTGATATAATGATGTATCTGGCCTGTAGTACGTAT
GATGGTAATTATTCAACTATTTATTATTGTTTTGTATTGGGGGCTGATATCAATCAGGCAATGTTAACCTCGGTAATAAACCA
TCGTATTGGTAACTTGTTCCTTTGTATAGATTTAGGGGCTGATGCCTTCGAAGACAGTATGAAACTAGCAAAACAAAAGAATC
ATAATATATTAGTACATATATTATCGTTTAAAAACTATAGTCCAGACTTCTCCCTTTTATCAATAAAAACGACAGATCCAGAG
AAAATTAATGCCTTACTAGATGAAGAAAAGTATGAGTCAAAAAATATGTTAATGTATGATGAATTTGACGCCTGTACTAATAA
TGTTTAA
Warmbaths MGF 360 14L
SEQ ID No. 129
ATGCCTACTCCACTTTCTCTACAGACTCTTGCTAAAAAAGTACTGGCCACACAGTATATATCCATAGATTATTACTTTATTTT
GAAATATTGTGGTTTATGGTGGCATGGAGCCCCTATTATGATTTCCATTGATAAGAATAAAAGCCAAATACTGATAAAATCGG
CAAGCTTCAAAGAAGGCTTATCTTTAGATATCGCATTAATGAAAGCTGTGCAGGAAAACAATCATGATTTAATAAAGCTGTTT
ACCGAGTGGGGTGCAGACATCAACTCTAGCTTAGTCACTGTTAATACGGAGTGTACCCGAAACCTCTGTCGGGAATTAGGCGC
GAAGGAAGCTTTGAATGAAAGGGATATTTTACAAATATTTTATAAAACACGTGATATTAAAACTAGCAGTAATGTTATACTAT
GCCATGAATTGTTATCCAATAACCCCCTTTTCCAAAATATAGAGAGAATGCGTTCAATAATTTATAGGAGTCTGGAAAAACTA
TCAATTAACTTTATATTGGATGATATTTCATTTAGCGAAATGTTAACTAGACACTGGTATAGGTTGGCGATATTATATAACCT
AACTGAAGCTATCCAATATTTCTATGAAAAATACAAGCATTTTAAAGATTGGCGGCTAATATGTGGGCTTTCTTTTAACAATC
TGTCTGACCTTCATGAAATATATAACTTAGAGAAGGTTGATATGGACATTGATATAATGATGTATCTGGCCTGTAGTACGTAT
GATGGTAATTATTCAACTATTTATTATTGTTTTGTATTGGGGGCTGATATCAATCAGGCAATGTTAACCTCGGTAATAAACCA
TCGTATTGGTAACTTGTTCCTTTGTATAGATTTAGGGGCTGATGCCTTCGAAGACAGTATGAAACTAGCAAAACAAAAGAATC
ATAATATATTAGTACATATATTATCGTTTAAAAACTATAGTCCAGACTTCTCCCTTTTATCAATAAAAACGACAGATCCAGAG
AAAATTAATGCCTTACTAGATGAAGAAAAGTATGAGTCAAAAAATATGTTAATGTATGATGAATTTGACGCCTGTACTAATAA
TGTTTAA
Ken05/Tk1 MGF 360 14L
SEQ ID No. 130
ATGCCTACACCGTCTTCTTTACAAGTCCTTGTCAAAAGGGTGTTGGACTACCAGCATCATGTATCTGAAGATGATTATTGTAT
TTTACAGCATTGTGGGTTGTGGTGGCATGGAAGTCCAATTATGTTTTTTACTAATGAAAATCATCAAAGGATGATAAAATCAG
CAAGCTTTAAAGATGGTTTAGAAATAAATCTCGCATTAATGAAGGCCGTACAGGAAAACAATTGTATCTTAATAGAGCTGTTT
ACCGAATGGGGTGCAGACATTAATTATGGATTGATTACTGTCAATACGGAATATACCCGAAACCTATGTCGAAATCTAGGTGC
CAAGGAGGCGTTAAATACACGGAAAATTTTAGATGTATTTTTAAATTTAAAGGATTTTAAAAGTAGTAATCATATTATTCTAT
GCCATGAATTGTTATCTAATAATCCTCTTTTACTAAGTGAAAATAATGATTATTTGAGAAAAATAATTAATTGTAATCTAAGG
AGAATATCAATTAACTTTATATTGGATGAAATTTCATTTAATGAAAAGCTAACCAGATTCTGGTATAAACAGGCAGTACTAAA
TAATCTTACTGAAGCTATCCAATATTTCTATCAAAAATATAAGCAGTTTAAAGACTGGCGACTAATATGTGGACTTGCTTTAA
ATAATGTATTTGATCTTCATGAAATATATAACAAAGAGAAGGCTGATATAGATATTAATCAAATGATAGAGATAACCTGTACA
TATATGTGTAGTTATCCCACCATTTACTATTGTTTTGTAATGGGGGCTGACATTAATCGGGCAATGATTACCTCAGTTACAAA
ATCTTATACTGGTAACTTGTTCTTTTGTATAGATTTAGGAGCTACTGCCTTCGAAGAGTGCTTAGAAATAGCAAAACAACAGA
ATGATAATGAATTGGTAAAGGTATTATCATTGAAAAACTATTACAGTCCAGATAGCTCCCTTTTATCATTAAAAATAACAGAT
CCGGAAAAAATTAATATCTTATTAGATGATGAAACATATGAGTCAAAAAATGAGTTAATATATGAAGAATTAATATAA
Kenya 1950 MGF 360 14L
SEQ ID No. 131
ATGTCCACACCATCTTCTTTACAAGTCCTTGTCAAAAGGGTGCTGGACTTCCAGCATGTGTCTGAAGATGATTACTGTATTTT
AAAATGTTGTGGGTTATGGTGGCATGGAGGCCCAATCATGCTTTCTACGAATGAGGATAATCAAATGATGATAAAATCAGCAA
GTTTTAAAGATGGTTTAGAGATAAATCTCGCATTAATGATGGCCGTACAAGAAAACAATTGTAGCCTAATAGAGCTGTTTACC
GAATGGGGTGCAGACATTAATTCTGGATTGGTTACTGTCAACACGGAATACACCCGAAACCTATGTCGAAATCTAGGTGCTAA
GGAGACATTAAATAAACGGGAAATTTTAGATGTATTTTTAAAATTAAAGAATTTTAAAAGTAGTAATAATATTATTCTATCCC
ATGAATTATTATCTAATAATCCTCTTTTCCTAAGTGAAGATAATGATTATTTTAGAAGAATAATTAATTGTAATCTAAGGAGA
ATATCAATTAACTTTATATTGGATGAAATTTCATTTAATGAAAAGCTAACCAGATTCTGGTATAGTCAGGCGGTACTATATAA
TCTTACTGAAGCTATCCAATATTTCTATCAAAAATATGAACATCTCAATGAGTGGCGTTTAATTTGTGCGCTTTCTTTTAATA
ATGTGTTTGATCTTCATGAAATATATAACAAAGAAAAGGTTGGTATGGATATTAATCAAATGATAGAGATAACCTGTGCATAT
ATGTGTAGTTATTCCACCATTTACTATTGTTTTGTAATGGGAGCTGACATTAATCGGGCAATGATTATCTCGGTTACAAAATC
TTATACTTATAACTTGTTCTTTTGTATAGATTTAGGAGCTACTGCCTTCGAAGAGTGTTTAGAAATAGCAAAACAACAGAATA
ATAATGAATTAGTAAAAATATTATCATTGAAAAACTATTATAGTCCAGATAGCTCCCTTATATCATTAAAAATAACAGATCCG
GAGAAAATTAATATCTTATTAGATGAGGAAAATTATGAGTCAAAAAATGAGTTAATATATGAAGAATCTAATATAAATAATAG
CGATGATATATTTTGA
Ken06.Bus MGF 360 14L
SEQ ID No. 132
ATGCCATCTACTTTACAAGCACTTGCTAAAAAAGTACTGGCCACACCGCATATATCTAAAAAATATTGTCAGTCTAAGGAGTA
CTGTCATATATTAAAATGTTGTGGTTTATGGTGGCATGATGCTCCAATTACAATTTATCCTTGTATAAATAAAATATTGATAA
AAACAGCAAGCTTTAAACATGGTTTAGAGTTGAATGTCGCATTCATGAAAGCTGTACAGGAAAATAATTATGATCTAATAAGG
CTGTTTATTGAGTGGGGTGCGGATATCAACTTTGGGTTGGCCACTGTTAATACAGACCGTACCCGGGACCTGTGCCGGGAACT
AGGTGCGAAGGAAGCTTTAAGTGAAAAAGAAATTTTAGAAATATTTGATAAAATACAGTATATTAAAAGTAGCAGTAATATTA
TTGTATCCCATGAATTATTATCTAATAACCCCCTTTTCTTAAATAATGATCAATTGAAATTAAGAATGTTCGATGAACTACAT
AAACTATCAATCAACTTTGTATTACATGAGATATCATTTAATGAAATGCTAACTAGGTATTGGTATAGTATGGCGATACTATA
TAACCTCACCGCAGCCATTCAATATTTTTATCAATCCTACAAGCATTTTAAAGATTGGCGGTTAATATGTGGGCTTGCTTATA
ACAACGTGTTTGATCTTCATGAAATATATAACAAAGAGAAGGTTGATATGGATATTAATCAAATGATGCAGTTGGCCTGTATG
TATGATGGTAATTATACAACCATTTATTATTGTTTTATGTTGGGAGCTGACATTAATCGGGCAATGATTACCTCGGTTACAAA
ATCTTGTGATGGTAACTTATTCCTTTGTATAGATTTGGGGGCTGATGTATTTGAAGAGAGTATGAAAATGGCAATAGAAGATC
ATAATGACGTATTAGAAAGTATCTTATCATTTAAAAATTATTATAGTTCAGACGTTTCTCTGTTATCATTAAAGACGACAGAT
CCAGAAAAAATTAATGCCTTGTTAGAAGAAGAAAGTTACAAATCAAAAAATAGGTTGATATATAAAAGTTATTGA
Malawi Lil-20/1 (1983) MGF 360 14L
SEQ ID No. 133
ATGATGCCATCTACTTTACAAACACTTGCTAAAAAAACATTGGCCACACAGCATATATCTAAAAAATATTGGCCGTCTGAGGA
GTATTGTTATATATTAAAATGTTGTGGTTTATGGTGGCATGATTCTCCAATCACGATTTTTACTTGTATAAAACAAATATTAA
TAAAAACAGCAAACTTTAAACATGGTTTAGACTTAAACCTTGCATTAATGAAAGCTGTACAAGAAAATAACTATGAATTGATC
ATGTTGTTTACTGAGTGGGGTGCGGATATCAACTTGGGGTTGATCACTGTTAATACAGAGTGCACCCGAGATTTGTGCCAAAA
GTTAGGTGCAAAGGAAGCTTTGAGTGCAAAGGAAATTTTAGAAATATTTTATAAAATACAGTATATTAAGAGTAGCAATAATA
TTATTATATCTCATGAATTAATATCTAATCATCCCCTTTTCCTAAATAATGATCAATTGAAATTAAGAATTGTTGGTGAACTA
AATGCTATATCAATCAACTTTATATTGGATGAGATATCATTCAATGAAATGCTAACTAGGTATTGGTATAGTATGGCGATACT
ATATAAACTCCCTGCAGCCATTCAATATTTTTATCAATCATACAAGTATTTTAAAGATTGGCGGTTAATATGTAGCCTTGCTT
ATAACAACGTGTTTGACCTTCATGAAATTTATAATAAAGAGAAGACTGATATAAACATTGATGAAATGATGCGGTTGGCCTGT
AGGTATGATGGTAATTATACAACTATTTATTATTGTTTTATGTTGGGGGCTGACATTAATCAGGCAATGATTACCTCGGTCAT
GAATCTTTGGGACGGTAACTTATTTCTTTGTATAGATTTGGGGGCTGATGTATTTGAAGAGTGTATGAAAATAGCAATAGAAG
ATCATAATGGTGTATTAGAAAGTATCTTATCATTTAAAAATTATTATAGTCCAGACGTTTCTCTGTTATCATTAAAAACGACA
GATCCGGAAAAAATTAATGACTTGCTAGATGAAGATATCTATAAATCAAAAAATAGGTTGATATATAAAAGTTGTTGA

[0242] In an embodiment the attenuated ASFV of the invention comprises a functional version of MGF 360 21R. Suitably the functional version of MGF 360 21R comprises the sequence of SEQ ID No. 124, 125, 126, 127, 128, 129, 130, 131, 132 or 133. Suitably the functional version of MGF 360 21R comprises a sequence having at least 70%, at least 80%, at least 90% or at least 95% identity with SEQ ID No. 124, 125, 126, 127, 128, 129, 130, 131, 132 or 133. Suitably the functional version of MGF 360 21R consists of the sequence of SEQ ID No. 124, 125, 126, 127, 128, 129, 130, 131, 132 or 133.

### MGF 505 1R Gene Sequences

Georgia 2007/1 MGF 505 1R (LR743116.1:28707-30302)
SEQ ID No. 134
ATGTTCTCTCTCCAGAACTTATGTCGAAAAACATTACCTAACCGTAAACTTCCTGAATTTTTTGACGAATATATATTACAACT
GCTGGGATTATACTGGGAAAACCATGGAACTATTCAACGAGCAGGAAACAACTGTGTGCTTATACAGCAACATACCCTCATTC
CCGTAAATGAAGCCCTGAGAACAGCAGCATCTGAAGAAAATTATGAGATCGTGAGCCTTTTATTAGCGTGGGAGGGGAACCTT
TACTATGCTATTATAGGGGCTCTAGAGGGCAACCGCCACGACTTAATTCGTAAATATGATGACCAAATCAAGGACCATCATGA
AATTCTGCCATTCATTGACGATCCAGTCATATTTCACAAATGCCATATCATGCGGCAATGCTTTTTTGATTGTATTTTATATC
AAGCTGTAAAATATAGTAAGTTTCGCGTTCTTCTTTACTTTAAACATAGATTAGAGGATGATTTGCCCTTCACTCATTTACTT
ATTGAAAAGGCATGTAAAGATCATAATTATGAAGTTATTAAATGGATATATGAAAACCTACATATCTACAATATGATAGATAC
CTTTGAATGTGCTATTGCCCATAAGGATCTACATCTATATTGTTTGGGGTATAGATTTATATATAACAGAATCGTACCCGATA
AGTATCATCATTTAGATATTCGCATGCTTTCAAGCCTACAACTCCTACATAAGGTGGCAGCCAAAGGATACTTAGATTTTATC
CTAGAAACCTTAAAGTATGATCATAATAAAGATAATATAAATATTATTCTAACACAAGCTGCAACCTATAACCATAGAAAAAT
TTTAATCTATTTCATTCCTCAATCAACCCACGCACAGATAGAACAATGTTTACTAGTGGCGATAAAAGCAAAATCTTCCAGGA
AAACCTTGAACTTACTACTGTCTCACCTAAACCTTTCCATCAACCTCATCAAAAAAATAAGCCATTATGTTGCCACTTACAAT
TCAACAAATATAATAGGCATTCTGAGTATGCGGCGGAAAAAGAAGATATATTTAGATATCATATTGACAAAATTTGTAAAAAA
AGCTATTTTTAATAAGTTTGTCGTTCGATGTATGGATACATTTTCTATAAACCCGGAAAGAATCCTTAAAATAGCCGCGCGAA
TAAATAGGATGATGTTAGTGAAAAAAATATCTGAACATGTTTGGAAAAATCATGCGGTTAGACTTAAATACCTTAAACATGCG
GTACACACGATGAAGCATAAAGATGGGAAAAATAGACTCATGAACTTTATCTATGATCGCTGTTATTACCATATGCAAGGGGA
AGAAATCTTTAGCCTCGCAAGATTTTATGCAATCCATCATGCACCAAAGTTGTTTGACGTTTTTTATGATTGTTGTATCCTAG
ATACGATACGATTCAAAAGCCTTCTTTTAGATTGTTCACATATCATAGGTAAAAACGCTCATGATGCTACCAATATCAACATC
GTGAACAAGTATATCGGCAACCTGTTTGTTATGGGAGTTCTTAGCAAAAAAGAAATCTTACAGGACTATCCATCCATTTATTC
TAAACAATACATGCCTTAG
China/2018/AnhuiXCGQ MGF 505 1R (MK128995.1:27736-29331)
SEQ ID No. 135
ATGTTCTCTCTCCAGAACTTATGTCGAAAAACATTACCTAACCGTAAACTTCCTGAATTTTTTGACGAATATATATTACAACT
GCTGGGATTATACTGGGAAAACCATGGAACTATTCAACGAGCAGGAAACAACTGTGTGCTTATACAGCAACATACCCTCATTC
CCGTAAATGAAGCCCTGAGAACAGCAGCATCTGAAGAAAATTATGAGATCGTGAGCCTTTTATTAGCGTGGGAGGGGAACCTT
TACTATGCTATTATAGGGGCTCTAGAGGGCAACCGCCACGACTTAATTCGTAAATATGATGACCAAATCAAGGACCATCATGA
AATTCTGCCATTCATTGACGATCCAGTCATATTTCACAAATGCCATATCATGCGGCAATGCTTTTTTGATTGTATTTTATATC
AAGCTGTAAAATATAGTAAGTTTCGCGTTCTTCTTTACTTTAAACATAGATTAGAGGATGATTTGCCCTTCACTCATTTACTT
ATTGAAAAGGCATGTAAAGATCATAATTATGAAGTTATTAAATGGATATATGAAAACCTACATATCTACAATATGATAGATAC
CTTTGAATGTGCTATTGCCCATAAGGATCTACATCTATATTGTTTGGGGTATAGATTTATATATAACAGAATCGTACCCGATA
AGTATCATCATTTAGATATTCGCATGCTTTCAAGCCTACAACTCCTACATAAGGTGGCAGCCAAAGGATACTTAGATTTTATC
CTAGAAACCTTAAAGTATGATCATAATAAAGATAATATAAATATTATTCTAACACAAGCTGCAACCTATAACCATAGAAAAAT
TTTAATCTATTTCATTCCTCAATCAACCCACGCACAGATAGAACAATGTTTACTAGTGGCGATAAAAGCAAAATCTTCCAGGA
AAACCTTGAACTTACTACTGTCTCACCTAAACCTTTCCATCAACCTCATCAAAAAAATAAGCCATTATGTTGCCACTTACAAT
TCAACAAATATAATAGGCATTCTGAGTATGCGGCGGAAAAAGAAGATATATTTAGATATCATATTGACAAAATTTGTAAAAAA
AGCTATTTTTAATAAGTTTGTCGTTCGATGTATGGATACATTTTCTATAAACCCGGAAAGAATCCTTAAAATAGCCGCGCGAA
TAAATAGGATGATGTTAGTGAAAAAAATATCTGAACATGTTTGGAAAAATCATGCGGTTAGACTTAAATACCTTAAACATGCG
GTACACACGATGAAGCATAAAGATGGGAAAAATAGACTCATGAACTTTATCTATGATCGCTGTTATTACCATATGCAAGGGGA
AGAAATCTTTAGCCTCGCAAGATTTTATGCAATCCATCATGCACCAAAGTTGTTTGACGTTTTTTATGATTGTTGTATCCTAG
ATACGATACGATTCAAAAGCCTTCTTTTAGATTGTTCACATATCATAGGTAAAAACGCTCATGATGCTACCAATATCAACATC
GTGAACAAGTATATCGGCAACCTGTTTGTTATGGGAGTTCTTAGCAAAAAAGAAATCTTACAGGACTATCCATCCATTTATTC
TAAACAATACATGCCTTAG
Tengani 62 MGF 505 1R (AY261364.1:22891-24486)
SEQ ID No. 136
ATGTTCTCTCTTCAGAACCTATGTCGAAAAACATTACCTGACTGTAAACTTCCTGAATTTTTTGACGAATATATATTACAACT
GCTGGGATTATACTGGGAAAACCATGGAACTATTCAACGAGCAGGAAACAACTGTGTGCTTATACAGCAACATAACCTCATTC
CCGTAAATGAAGCCCTAAGAATAGCAGCATCTGAAGAAAATTATGAGATCGTGAGTCTTTTATTAGCATGGGAGGGGAACCTT
TACTATGCTATTATAGGGGCTCTAGAGGGCAACCGCCACGACTTAATTCGTAAGTATGATGACCAAATCAAGGACCATCATGA
AATTCTGCCATTCATTGACGATCCAGTAATATTTCACAAATGCCATATCATGCGGCAATGCTTTTTTGATTGTATTTTATATC
AAGCTGTAAAATATAGTAAGTTTCGCGTTCTTCTTTCTTTTAAACATAGATTAAGGGATGATTTGCCCTTCACTCATTTACTT
ATTGAAAAGGCATGTAAAGATCATAATTATGAAGTAATTAAATGGATATATGAAAACCTACATATCTACAATATGATAGATAC
CTTTGAATGTGCTATTGCCCATAAGGATCTACGTCTATATTGTTTGGGGTATAGATTTATATATAACAGGATCGTACCCGATA
AGTATCATCATTTAGATATTCGCATGCTTTCAAGCCTACAACTCCTGCATAAGGTGGCAGCCAAAGGATACTTAGATTTTATC
CTAGAAACCTTAAAGTATGATCATAATAAAGATAATATAAATATTATTCTAACACAAGCTGCAACCTATAACCATAGAAAAAT
TTTAATCTATTTCATTCCTCAATCAACCCACGCACAGATAGAACAATGTTTACTAGTGGCGATAAAAACAAAATCTTCCAAGA
AAACCTTGAACTTACTACTGTCTCACCTAAACCTTTCCATCAATCTCATCAAAAAAATAAGCCATTATGTTGCCACTTACAAT
TCAACAAATATAATAGGCATTCTGAGTATGCGGCGGAAAAAGAAGATATATTTAGATATCATATTGACAAAATTTGTAAAAAA
AGCTATTTTTAATAAATTTGTCGTTCGATGTATGGATACATTTTCTATAAACCCGGAAAGAATCCTTAAAATAGCCGCGCGAA
TAAATAGGACGATGTTAGTGAAAAAAATATCTGAACATGTTTGGAAAAATCATGCGGTTAGACTTAAATACCTTAAACATGCG
GTACACACGATGAAGCATAAAGATGGGAAAAATAGACTCATGAACTTTATCTATGATCGCTGTTATTACCATATGCAAGGGGA
AGAAATCTTTAGCCTCGCAAGATTTTATGCAATCCATCATGCACCAAAGTTGTTTGACGTTTTTTATGATTGTTGTATCCTAG
ATACGATACGATTCAAAAGCCTTCTTTTAGATTGTTCACATATCATAGGTAAAAACGCTCATGATGCTACCAATATCAACATC
GTGAACAAGTATATCGGCAACCTGTTTGTTATGGGAGTTCTTAGCAAAAAAGAAATCTTACAGGACTATCCATCCATCTATTC
TAAACATTACATGCCTTAG
Warmbaths MGF 505 1R (AY261365.1:27651-29246)
SEQ ID No. 137
ATGTTCTCTCTCCAGAACCTATGTCGAAAAACTTTACCTGACTGTAAACTTCCTGAATTTTTTGACGAATATATATTACAACT
GCTGGGATTATACTGGGAAAACCATGGAACTATTCAACGAGCAGGAAACAACTGTGTGCTTATACAGCAACGTACCCTCATTC
CCGTAAATGAAGCCCTGAGAATAGCAGCATCTGAAGAAAATTATGAGATCGTGGGCCTTTTATTAGCGTGGGAGGGGAACCTT
TACTATGCTATTATAGGAGCTCTAGAGGGCAACCGCCACGACTTAATTCGTAAATATGATGACCAAATCAAGGACCATCATGA
AATTCTGCCATTCATTGACGATCCAGTCATATTTCACAAATGCCATATAATCCGACGATGCTTTTTTAATTGTATTTTATATC
AAGCTGTAAAATATAGTAAGTTTCGCGTTCTTCTTTACTTTAAACATAGATTAGAGGATGATTTGCCCCTCACTCATTTACTT
ATTGAAAAGGCATGTGAAGATCATAATTATGAAGTTATTAAATGGATATATGAAAACCTACATACCTACGATATAATGGATAC
CTTTGAATGTGCTATTGCCCATAAGGATCTACGTCTATATTGTTTGGGGTATACATTTATATATAACAGGATCGTACCCTATG
AGTATCATCATTTAGATATTCTCATTCTTTCAAGCCTACAACTCCTGCATAAGGTGGCAGCCAAAGGATACTTAGATTTTATC
CTAGAAACCTTAAAGTATGATCATAACAATGATAATTTAGATATTATTCTAACACAAGCTGCAACATATAACCATAGAAAAAT
TTTAACCTATTTCATTCCTCAATTAACCTACGCACAAATAGAACAATGTTTGTTCATGGCGATAAAAAGAAAATCTTCCAAGA
AAACCTTGAACTTACTACTGTCTCACCTAACCCTTTCCATCGAACTCATCAAAAAAATAAGCCAATATGTTGTCACTTACAAT
TCAACAAATATAATAGGCATTCTGAGTATGAAGCGGAAAAAGAAGATATATTTAGATATCATGTTGACAAAATATGTAAAATA
CGCTATTTTTAATAAATATGTCGTTCGATGTATGGATAGATTTTCCATAAACCCGGAAAGAATCATCAAAATGGCCGCGCGAA
TAAATAGGATGATGTTAGTGAAAAAAATATCTGAACATGTTTGGAAAAATCATGCGGCTAGACTTAAACACCTTAAGCATGCG
GTACACACGATGAAGCATAAAGATGGGAAAAATAGACTCATGAACTTTATCTATGATCGCTGCTATTACCATATGCAAGGGGA
AGAAATCTTTAGCCTCGCAAGATTTTATGCAATCCATCATGCACCAAAGTTGTTTGACGTTTTTTATGATTGTTGTATCCTAG
ATACTATACAATTCAAAAGCCTTCTTTTAGATTGTTCACATATCATAGGTAAAAACGCTCATGATGCTACCAATATCAACATC
GTGAACAAGTATATTGGCGACCTGTTTGCTATGGGAGTTCTTAGCAAAAAAGAAATCTTACAGGACTATCCATCCATCTATTC
TAAACATTACATGCTTTAG
Mkuzi 1979 MGF 505 1R (AY261362.1:29425-31020)
SEQ ID No. 138
ATGTTCTCTCTCCAGAACTTATGTCGAAAAACATTACCTGATTGTAAACTTCCTGAATTTTTTGACGATTATATATTACAACT
GCTGGGATTATACTGGGAAAACCATGGAACTATTCAACGGGCAGGAAACAACTGTGTGCTTATACAGCAACATACCCTTATTC
CCATAAATGAAGCCCTGAGAACAGCAGCATCTGAAGAAAATTATGAGATCGTGAGCCTTTTATTAGCATGGGAGGGGAATCTT
TACTATGCTATTATAGGGGCTCTAGAGGGCAACCGCCACGACTTAATTCGTAAATATGATGACCAAATCAAGGACCATCATGA
AATTCTGCCATTCATTGACGATCCAGTAATATTTCACAAATGCCATATCATGCGGCGATGCTTTTTTGATTGTATTTTATATC
AAGCTGTAAAATATAGTAAGTTTCGCGTTCTTCTTTATTTTAAATATAGGTTAGAGGATGATTTACCCCTCACTCATTTACTT
ATTGAAAAGGCATGTGAAAATCATAATTATGAAGTTATTAGATGGATATATGAAAACCTACATATCTACAATATGATAGATAC
CTTTGAATGTGCTATTGCCCATAAGGATCTACGTCTATATTGTTTGGGGTATACATTTATATATAACAGGATCGTACCCAATA
AGTATCATCATATAGATATTCTCATTCTTTCAAGCCTACAACTCCTGCATAAGGTGGCAGCCAAAGGATACTTAGACTTTATC
CTAGAAACCTTAAAGTATGATCATAACAATGATAATTTAGATATTATTCTAACACAAGCTGCAACATATAACCATAGAAAAAT
TTTAACCTATTTTATTCCTCAATCAACCTACGCACAAATAGAACAATGTTTGATGGTGGCGATAAAAACAAAATCTTCCAAGA
AAACCTTGAATTTACTATTGTCCCACCTAAACCTTTCCATCAAACTCATCAAAAAAATAAGCCAATATGTTGTCACTTACAAT
TCAACAAATATAATAGGCATTCTGAGTATGAAGCGAAAAAAGAAGATATATTTAGATATCTTGTTGACAAAATTTGTAAAAAA
TGCTATTTTTAATAAATTTGTCGTTCGATATATGGATACGTTTTCTATAAACCCGGAAAAAATCGTCAAAATGGCCGCGCGAA
TAAATAAGATGATGTTAGTGAAAAAAATATCTGAACATATTTGGAAAAATCATGCGGCTAGACTTGAACACCTTAAACATGCG
GTACACACGATGAAGCATAAAGATGGGAAAAATAGACTCATGAACTTTATCTATGAGTACTGCTATTACCATATGCAAGGGGA
AGAAATTTTTAGCCTCGCAAGATTTTATGCAATCCATCATGCACCAAAGTTGTTCGACGTTTTTTATAATTGTTGTATCCTAG
ATACGATACGATTCAAAAGCCTTCTTTTAGATTGTTCACATATCATAGGTAAAAACGCTCATGATGCTACTAATATCAACATC
GTGAACAAGTATATTGACAACCTGTTTGCTATGGGAGTTCTTAGCAAAAAAGAAATCTTACAGGACTATCCATCCATTTATTC
TAAACATTATATGCCTTAG
Warthog MGF 505 1R (AY261366.1:24387-25982)
SEQ ID No. 139
ATGTTTTCTCTCCAGAACTTGTGTCGAAAAACATTACCTGACTGTAAACTTCCTGAATTTTTTGACGAATATATATTACAACT
GCTGGGATTATACTGGGAAAACCATGGAACTATTCAACGAGCAGGAAACAACTGTGTGCTTATACAGCAACATACCCTCATTC
CCGTAAACGAAGCCCTGAGAATAGCAGCATCTGAAGAAAATTATGAGATCGTGAGCCTTTTATTAGCGTGGGAGGGAAACCTT
TACTATGCTATTATAGGAGCTCTAGAGGGCAACCGCCACGACTTAATTCGTAAATATGATGACCAAATCAAGGACCATCATGA
AATTCTGCCATTCATTGACGATCCAGTCATATTTCACAAATGCCATATCATGCGGCGATGCTTTTTTGATTGTATTTTATATC
AAGCTGTAAAATATAGTAAGTTTCGCGTTCTTCTTTATTTTAAATATAGGTTAGAGAATGATTTGCCCCTCGCTCATTTACTT
ATTAAAAAGGCATGTGAAGATCATAATTATGAAGTTATTAAATGGATATATGAAAACCTACATATCTACAATATAATGGATAC
CTTTGGATGTGCTATTGCCCATAAGGATCTACGTCTATATCGTTTGGGGTATACATTTATATATAACAGGATCGTACCCTATA
AGTATCATTATTTAGATGTTCTCATTCTTTCAGGCCTACATCTCCTGTATAAGGTGGCAGCCAAAGGATACTTAGATTTTATC
CTAGAAACCTTAAAGTATGATCATAACAATGATAATTTAGATATTATTCTAACACAAGCTGCAACATATAACCATAGAAAAAT
TTTAACCTATTACATTCCTCAATTAACCTATGCACAAATAGAACAATGTTTGTTCATGGCGATTAAAAAAAAATCTTCCAAGA
AAACCTTGAACTTACTACTGTCTCACCTAAAGCTTTCCATCAAACTCATCAAAAAAATAAGCCAATATGTTGCCACTTACAAT
TCAACAAATATAATAGGCATTCTGAATATGCGGCGGAAAAAGAAGATATATTTAGATATCATATTGACAAAATTTGTAAAAAA
AGCTATTTTTAATAAATTTGTCGTTCGATGTATGGATACATTTTCCATAAACCCGGAAAGAATCATCAAAATGGCCGCGCGAA
TAAATAAGATGTTGTTAGTGAAAAAAATATCTGAACATGCTTGGAAAAATCATGCGGCTAGACTTAAACACCTTAAGCATGCG
GTATACACGATGAAACATAAAGATGGGAAAAATAGACTCATGAACTTGATCTATGATCACTACTATTACCATATGCAAGGGGA
AGAAATCTTTAGCCTCGCAAGATTTTATGCAATCCATCATGCACCAAAGTTGTTTGACGTTTTTTATGATTGTTGTCTCCTAG
ATACTATACGATTTAAAAACCTTCTTTTAGATTGTTCACACATCATAGGTAAAAACGCTCATGATGCTACTAATATCACTATC
GTGAACAAGTATATTGGCAACCTGTTTGCTATGGGAGTTCTTAGCAAAAAAGAAATCTTACAGGACTATCCATCCATCTATTC
TAAACATTACATGCCTTAG
L60 MGF 505 1R (NC_044941.1:22320-23915)
SEQ ID No. 140
ATGTTCTCTCTCCAGAACTTATGTCGAAAAACATTACCTGACTGTAAACTTCCTGAATTTTTTGACGATTATATATTACAACT
GCTGGGATTATACTGGGAAAACCATGGAACTATTCAACGGGCAGGAAACAACTGTGTGCTTATACAACAACATACCCTCATTC
CCGTAAATGAAGCCCTAAGAATAGCAGCATCTGAAGAAAATTATGAGATCGTGGGCCTTTTATTAGCGTGGGAGGGGAACCTT
TACTATGCTATTATAGGGGCTCTAGAGGGTAACCGCTACAACTTAATTCGTAAATATGATGATCAAATCAAGGACCATCATGA
CATTCTGCCATTCATTGATGATCCAATCATATTTCACAAATGCCATATCATGCGGCGATGCTTTTTTGATTGTATTTTATATC
AAGCTGTAAAATATAGTAAGTTTCGTGTTCTTCTTTATTTTAAATATACATTAGAGGATGATTTGCCCCTCGTTCATTTACTT
ATTGAAAAGGCATGTGAAGATCATAATTATGAAGTTATTAAATGGATATATGAAAACCTACATGTCTGCCATATAATAGATAC
CTTTGACTGTGCTATTGCCCATAAAGATCTACGTTTATATTGTTTGGGGTATACATTTATATACAACAGGATTGTACCCTATA
AGTATCATCATTTAGATATTCTCATACTTTCAAGCCTACAACTCCTACATAAGGTGGCGGCCAAAGGATACTTAGATTTTATC
CTAGAAACCTTAAAGTATGATCATAATATAGATAATTTAGATGTTATTCTAACACAAGCTGCAACATATAACCATAGAAAAAT
TTTAACCTATTTTATTCCTCAATCAACCTACGCACAAATAGAACAATGTTTGTTCGTGGCGATAAAAACAAAATCTTCCAAGA
AAACCTTGAACTTACTACTGTCTCACCTAAACCTTTCCATCAAACTCATCCAAAAAATCAGCCAATATGTTGCCACTTTCAAT
TCAACAAATATAATAGGCATTCTGAGTATGAAGCGGAAAAAGAAGATATATTTGGATATCATATTGACAAAATTTGTAAAAAA
TGCTATTTTTAATAAATTTGTCGTTCGATGTATGGAGAGATTTTCTATAAACCCGGAAAGAATCGTCAAAATGGCTGCGCGTA
TAAATAAGATGATGTTAGTGAAAAAAATATCTGAACATGTTTGGAAAAATCATGCGGCTAGACTTAAACACCTTAAACATGCG
GTACACACGATGAAGCATAAAGATGGGAAAAATAGACTCATGAACTTTATCTATGAACACTGCTATTACCATATGCAAGGGGA
AGAAATTTTTAGCCTCGCAAGATTTTATGCAATCCATCATGCACCAAAGTTGTTCGACGTTTTTTATAATTGTTGTATCCTAG
ATACGATACGATTCAAAAGCCTTCTTTTAGATTGTTCACATATCATAGGTAAAAACGCTCATGATGCTACTAATATCAACATC
GTGAACAAGTATATTGGCAACCTGTTTGCTATGGGAGTTCTTAGCAAAAAAGAAATCTTACAGGACTATCCATCCATCTATTC
TAAACATTATATGCCTTAG
Benin 97/1 MGF 505 1R (NC_044956.1:21971-23566)
SEQ ID No. 141
ATGTTCTCTCTCCAGAACTTATGTCGAAAAACATTACCTGACTGTAAACTTCCTGAATTTTTTGACGATTATATATTACAACT
GCTGGGATTATACTGGGAAAACCATGGAACTATTCAACGGGCAGGAAACAACTGTGTGCTTATACAACAACATACCCTCATTC
CCGTAAATGAAGCCCTAAGAATAGCAGCATCTGAAGAAAATTATGAGATCGTGGGCCTTTTATTAGCGTGGGAGGGGAACCTT
TACTATGCTATTATAGGGGCTCTAGAGGGTAACCGCTACAACTTAATTCGTAAATATGATGATCAAATCAAGGACCATCATGA
CATTCTGCCATTCATTGATGATCCAATCATATTTCACAAATGCCATATCATGCGGCGATGCTTTTTTGATTGTATTTTATATC
AAGCTGTAAAATATAGTAAGTTTCGTGTTCTTCTTTATTTTAAATATACATTAGAGGATGATTTGCCCCTCGTTCATTTACTT
ATTGAAAAGGCATGTGAAGATCATAATTATGAAGTTATTAAATGGATATATGAAAACCTACATGTCTGCCATATAATAGATAC
CTTTGACTGTGCTATTGCCCATAAAGATCTACGTTTATATTGTTTGGGGTATACATTTATATACAACAGGATTGTACCCTATA
AGTATCATCATTTAGATATTCTCATACTTTCAAGCCTACAACTCCTACATAAGGTGGCGGCCAAAGGATACTTAGATTTTATC
CTAGAAACCTTAAAGTATGATCATAATATAGATAATTTAGATGTTATTCTAACACAAGCTGCAACATATAACCATAGAAAAAT
TTTAACCTATTTTATTCCTCAATCAACCTACGCACAAATAGAACAATGTTTGTTCGTGGCGATAAAAACAAAATCTTCCAAGA
AAACCTTGAACTTACTACTGTCTCACCTAAACCTTTCCATCAAACTCATCCAAAAAATCAGCCAATATGTTGCCACTTTCAAT
TCAACAAATATAATAGGCATTCTGAGTATGAAGCGGAAAAAGAAGATATATTTGGATATCATATTGACAAAATTTGTAAAAAA
TGCTATTTTTAATAAATTTGTCGTTCGATGTATGGAGAGATTTTCTATAAACCCGGAAAGAATCGTCAAAATGGCTGCGCGTA
TAAATAAGATGATGTTAGTGAAAAAAATATCTGAACATGTTTGGAAAAATCATGCGGCTAGACTTAAACACCTTAAACATGCG
GTACACACGATGAAGCATAAAGATGGGAAAAATAGACTCATGAACTTTATCTATGAACACTGCTATTACCATATGCAAGGGGA
AGAAATTTTTAGCCTCGCAAGATTTTATGCAATCCATCATGCACCAAAGTTGTTCGACGTTTTTTATAATTGTTGTATCCTAG
ATACGATACGATTCAAAAGCCTTCTTTTAGATTGTTCACATATCATAGGTAAAAACGCTCATGATGCTACTAATATCAACATC
GTGAACAAGTATATTGGCAACCTGTTTGCTATGGGAGTTCTTAGCAAAAAAGAAATCTTACAGGACTATCCATCCATCTATTC
TAAACATTATATGCCTTAG
Pretorisuskop/96/4 MGF 505 1R (AY261363.1:28449-30044)
SEQ ID No. 142
ATGTTCTCTCTCCAGAACTTATGTCGAAAAACATTACCTGACTGTAAACTTCCTGAATTTTTTGACGAATATATATTACAACT
GCTGGGATTATACTGGGAAAACCATGGAACTATTCAACGAGCAGGAAACAACTGTGTGCTTGTACAACAACATACCCTCATTC
CCGTAAACGAAGCCCTGAGAATAGCAGCGTCTGAAGAAAATTATGAGATCGTGAGCCTTTTATTAGCGTGGGAGGGAAACCTT
TACTATGCTATTATAGGAGCTCTAGAGGGCAACCGCCACGACTTAATTCGTAAATATGATGACCAAATCAAGGACCATCATGA
AATTCTGCCATTCATTGACAATCCAGTCATATTTCACAAATGCCATATAATGCGGCGATGCTTTTTTGATTGTATTTTATATC
AAGCTGTAAAATATAGTAAGTTTCGCGTTCTTCTTTATTTTAAATATAGGTTAGAGAATGATTTGCCCCTCGCTCATTTACTT
GTTGAAAAGGCATGTGAAGATCATAATTATGAAGTTATTAAATGGTTATATGAAAACCTACATATCTACAATATAATGGAGAC
CTTTGAATGTGCTATTGCCCATAAGGATCTACGTCTATATCGTTTGGGGTATACATTTATATATAACAGGATCGTACCCTATA
AGTATCATTATTTAGATGTTCTCATTCTTTCAGGCCTACATCTCCTGTATAAGGTGGCAGCCAAAGGATACTTAGATTTTATC
CTAGAAACCTTAAAGTATGATCATAACAATGATAATTTAGATATTATTCTAACACAAGCTGTAACATATAACCATAGAAAAAT
TTTAACCTATTACATTCCTCAATTAACCTATGCACAAATAGAACAATGTTTGTTCATGGCGATTAAAAAAAAATCTTCCAAGA
AAACCTTGAACTTACTACTGTCTCACCTAAAGCTTTCCATCAAACTCATCAAAAAAATAAGCCAATATGTTGCCACTTACAAT
TCAACAAATATAATAGGCATTCTGAATATGAAGCGGAAAAAGAAGATATATTTAGATATCATATTGACAAAATTTGTAAAATA
CGCTATTTTTAATAAATATGTCGTTCGTTGTATGGATACATTTTCCATAAACCCGGAAAGAATCATCAAAATGGCCGCGCGAA
TAAATAAGATGTTGTTAGTGAAAAAAATATCTCAACATGCTTGGAAAAATCATGCGGCTAGACTTAAACACCTTAAGCATGCG
GTATACACGATGAAACATAAAGATGGGAAAAATAGACTCATGAACTTGATCTATGATCACTACTATTACCATATGCAAGGGGA
AGAAATCTTTAGCCTCGCAAGATTTTATGCAATCCATCATGCACCAAAGTTGTTTGACGTTTTTTATGATTGTTGTCTCCTAG
ATACTATACGATTTAAAAGCCTTCTTTTAGATTGTTCACACATCATAGGTAAAAACGCTCATGATGCTACTAATATCACTATC
GTGAACAAGTATATTGGCAACCTGTTTGCTATGGGAGTTCTTAGCAAAAAAGAAATCTTACAGGACTATCCATCCATCTATTC
TAAACATTACATGCCTTAG
Kenya 1950 MGF 505 1R (AY261360.1:31904-33496)
SEQ ID No. 143
ATGTTTTCTCTCCAGAACTTATGTCGAAAAACCTTACCTGACCGTAAACTTCCTGAATTTTTTGACGATTATGTATTACAACT
GCTGGGATTATACTGGGAAAACCATGGAACGATTCAACGAGCAGGAAACAACTGTGTACTTATCCAACAACATAACCTCATTC
CCGTAAATGAAGCCCTAAGAATAGCAGCATCTGAAGAAAATTATGAGATCGTGAGCCTTTTATTAGCTTGGGAGGGGAACCTT
TACTATGCTATTATAGGGGCTCTAGAGGGTAATCGCCACAACTTAATTCGTAAATATGATGACCAAATCAAGGACCATCATGA
AATTCTGCCATTTATTGACGATCCAGTCATATTTCACAAATGTCATATGATGCGGCGATGCTTTTTTAATTGTATTTTGTATC
AAGCTGTAAAATATAGTAAGTTTAGCGTTCTTCTATATTTTAAATATATATTAAAGGAGAATTTGCCCCTCGTTCATTCACTT
ATTGAAAAGGCGTGTGAAGATCATAATTATGAAGTTATTAAATGGATCTATGAAAACCTACATATCTATGAAATAATGGATAC
CTTTAAATGTGCTATTGCCCATAAAGATCTACATTTATATAGTTTAGGATATACATTTATATATAATAGGATCGTACCCTATA
AGTATCATCATTTAGATATTCGCATACTTTCAAGGCTACAACTTCTACATAAGGTGACAGCCAAAGGATACTTGGACTTTATC
CTAGAAACCTTAAAGTATGATCATAATAAAGATAATATAAATATTATTCTGACACAAGCTGCAACCTATAACCATAGAAACAT
TTTAACCTATTTCATTCCTCAATCAACCTACGCGCAGATAGAACAATGCTTATTCGTGGCAATAAAAACAAACGCTTCCAAGA
AAACCTTGAATTTACTATTATCTCACCTAAACCTTTCTATCAAACTCGTCAAAAAATTAAGCCAATATGTTGTTGCTTACAAG
TCAACAAATATCATAAGCATTCTGAGTATGCAGCAAAAAAAGAAGATATATTTAGATATCATTTTGACAAAGGTTGTAAAAAA
CGCTATTTTTATTAAATTTGTCATTGGATGTATGGTTACATTTTCCATAAACCCAGAAAGAATTGTCAAAATGGCCGCGCGAA
TAAAAAAGATGAAGTTAGTGAAAAATATATCTGAACATGTTTGGAAAAATCATGCGGCTAAACTTAAACACCTTAAGCATGCG
GTACACACGATGAAGCATCAAGAAGGAAAAAATAGATTAATGAACTTTATCTATGATCACTGTTATTACCACATGCAAGGAGA
AGAGATCTTTAGTCTTGCAAGATTTTATGCAATCCATCATGCGCCAAAATTGTTCGACGTTTTTTATGATTGTTGTATCCTAG
ATACGATACGATTTAAAAGCCTGCTTTTAGATTGTTCATATATCATAGCTAAAAACGCTCATGATGCTAGTATTAACATCGTG
AATAAGTATATTGGCAATCTATTTGCTATGGGGGTTCTTAGCAAAAAAGAAATCTTACAAGACTATCCATCCATCTATTCTAA
GGATTACATGCTTTAG
Ken06.Bus MGF 505 1R (NC_044946.1:25784-27376)
SEQ ID No. 144
ATGTTCTCTCTCCAGAACTTATGTCGAAAAACCTTACCTGACTGTAAACTTCCTGAGTTTTTTGACGATTATGTATTACAACT
GCTGGGCTTATACTGGGAAAATCATGGTACGATTCAACGAGCAGGAAACAACTGTGTACTTATCCAACAACATAACCTCATTC
CCGTAAATGAAGCCCTAAGAATAGCAGCATCTGAGGAAAATTATGAGATCGTGAGCCTTTTATTAGCGTGGGAGGGGAACCTT
TACTATGCTATTATAGGGGCTCTAGAGGGGAACCACCACAACTTAATTCGTAAATACGATGACCAAATCAAGGACCATCATGA
AATTCTGCCATTTATTGACGATCCAGTCATATTTCACAAATGTCATACAATGCGGCGATGCTTTTTTAATTGTATTTTATATC
AAGCTGTAAAATATAGTAAGTTCAGCGTTCTTCTATACTTTAAATATATATTAAAGGAGAATTTGCCCCTCGTCCACTCACTT
ATTGAAAAGGCGTATAAATATCATAATTATGAGGTTATTAAATGGATCTATGAAAACCTACATATCTATGATATCATAAATAC
TTTTAAATGTGCTATTGCCCATAAAGATCTACGTTTATATTGTTTAGGGTATACATTTGTATATAATAGAATCGTACCCTATA
AGTATTATCATTTAGATATTCGCATCCTTTTAAGGCTACAACTTCTACATAAGGTGACAGCCAAAGGATACTTGGATTTTATC
CTAGAAACCTTAAAGTATGATCATAATACAAACAATATAGATATTATCCTAACACAGGCTGCAACCTATAACCATAGAAACAT
TTTAACCTATTTCATTCCTCAATCAACCTACGCACAAATAGAACAATGTTTATTCGTGGCGATAAAAACAAATGCTTCCAAGA
AAACCTTGAATTTACTATTATCTCACCTAAATCTTTCTATCAAACTCGTCAAAAAATTAAGCCAATATGTTGTCGCTTACAAG
TCAACAAATATCATAAGCATTCTGAGTAGGCAGCAAAAAAAGAAGATATATTTAGATATCATTTTGACAAAGGTTGTAAAAAA
TGCTGTTTTTAATAAATTTGTCATTGGATGTATGGTTACATTTTCCATAAACCCAGAAAGAATTGTCAAAATGGCCGCGCGAA
TAAAAAAGATGAAGTTAGTAAAAAATATATCTGAACATGTTTGGAAAAATCATGCGGTTAAACTTAAATATCTTAAGCATGCG
GTACACACGATGAAGCATCAAGAAGGAAAAAATAGATTAATGAACTTTATCTATGATCACTGTTATTACCACATGCAAGAAGA
AGAGATCTTTAGCCTCGCAAGATTTTATGCAATCCATCATGCGCCAAAATTGTTCGACGTTTTTTATGATTGTTGTATCCTAG
ATACGATACGATTTAAAAGCCTGCTTTTAGATTGTTCACATATCATAGTTAAAAACGCTCATGATGCTAGTATTAACATCGTG
AACAAGTATATTGGCAATCTATTTGCTATGGGAGTTCTTAGCAAAAAAGAAATCTTACAAGACTATCCATCTATCTATTCTAA
GGATTACATGCTTTAG
Ken05/Tk1 MGF 505 1R (NC_044945.1:29657-31249)
SEQ ID No. 145
ATGTTCTCTCTCCAAAACTTATGTCGAAAAACCTTACCTGACTGTAAACTTCCTGAATTTTTTGACGATTATGTATTACAACT
GCTGGGATTATACTGGGAAAACCATGGAACGATTCAACGAGCAGGAAACAACTGTGTACTTATCCAACAACATAACCTCATTC
CCGTAAATGAAGCCCTAAGAATAGCAGCATCTGAAGAAAATTATGAGATCGTGAGCCTTTTATTAGCGTGGGAGGGGAACCTT
TACTATGCTATTATAGGGGCTCTAGAGGGTAACCGCCACAACTTAATTCGTAAATATGATGACCAAATCAAGGACCATCATGA
AATTCTGCCATTTATTGACGATCCAGTTATATTTCACAAATGTCATATAATGCGGCGATGCTTTTTTAATTGTATGTTGTATC
AAGCTGTAAAATATAGTAAGTTTAGCGTTCTTCTATATTTTAAATATATATTAAAGGAAAATTTGCCCCTCGTCCACTCACTC
ATTGAAAAAGCGTATAAATATCATAATTATGAGGTTATTAAATGGATCTATGAAAATCTACATATCTATGATATCATAAATAC
TTTTAAATATGCTATTGCCCATAAAGATCTACGTTTATATTGTTTAGGGTATACATTTGTATATAATAGGATCGTACCCTATA
AGTATTATCATTTAGATATTCGCATCCTTTTAAGGCTACAACTTCTACATAAGGTGACAGCCAAAGGATACTTGGATTTTATC
CTAGAAACCTTAAAGTATGATCATAATACAAACAATATAGATATTATCCTAACACAGGCTGCAACCTATAACCATAGAAACAT
TTTAACCTATTTCATTCCTCAATCAACCTACGCACAAATAGAACAATGCTTATTCGTGGCAATAAAAACAAACGCTTCCAAAA
AAACCTTGAATTTACTATTATCTCACCTAAACCTTTCTATCAAACTCGTCAAAAAATTAAGCCAATATGTTGTCGCTTACAAG
TCAACAAATATCATAAGCATTCTGAGTATGCAGCAAAAAAAGAAGATATATTTAGATATCATTTTGACAAAGGTTGTAAAAAA
CGCTGTTTTTATTAAATTTGTCATTGGATGTATGGTTACATTTTCCATAAACCCAGAAAGAATTGTCAAAATGGCCGCGCGAA
TAAAAAAGATGAAGTTAGTAAAAAATATATCTGAACATGTTTGGAAAAATCATGCGGCTAAACTTAAACATCTTAAGCATGCG
GTACACACGATGAAGCATCAAGAAGGAAAAAATAGACTCATGAACTTTATCTATGATCACTGCTATTACCACATGCAAGGAGA
AGAGATCTTTAGTCTTGCAAGATTTTATGCAATCCATCATGCGCCAAAATTGTTCGACGTTTTTTATGATTGTTGTATCCTAG
ATACGATACGATTTAAAAGCCTGCTTTTAGATTGTTCACATATTATAGCTAAAAACGCTCATGATGCTAGTATTAACATCGTG
AATAAGTATATTGGCAATCTATTTGCTATGGGAGTTCTTAGCAAAAAAGAAATCTTACAAGACTATCCATCCATCTATTCTAA
ATATGACATACTTTAG
Malawi Lil-20/1 (1983) MGF 505 1R (AY261361.1:26041-27633)
SEQ ID No. 146
ATGTTCTCTCTCCAGAACTTATGTCGAAAAACATTACCTGACTGTAAACTTCCTGAATTTTTTGACGAATATATATTACAACT
GCTGGGATTATACTGGGAAAACCATGGAACTATTCAACGAGCAGGAAACAACTGTGTGCTTATCCAGCAACATAACCTTATTC
CCGTAAATGAAGCCCTAAGAATAGCAGCATCTGAAGAAAATTATGAGATCGTGAGCCTTTTATTAGCGTGGGAGGGAAACCTT
TACTATGCTATTATAGGGGCTCTAGAGGGCAACCGCCCCGACTTAATTCGTAAATATGATGACCAAATCAAGGACCATCATGA
AATTTTGCCATTCATCGACGATCCAATCATATTTCACAAATGTCACATAATGCGGCGATGCTTTTTTAATTGTATTTTATATC
AAGCTGTAAAATATAGTAAGTTTCGTGTTCTTCTTTATTTTAAACATAGGTTAGGGGATGATTTGCCCCTCACTCATTTACTT
ATTGAAAAGGCATGTGAAGATCATAATTATGAAGTTATTAAATGGATCTATGAAAACCTACATAGCTACAATATAATGGATAC
CTTTGAATGTGCTATTGCCCATAAGGATCTACGTCTATATTGTTTGGGGTATACATTTATATATAATAGGATCGTACCCTATA
AGTATCATCATTTAGATATTTGCATACTTTCAAGCCTACAACTCCTGCATAAGGTGGCAGCCAAAGGATACTTGGATTTTATC
CTAGAAACCTTAAAGTATGATCATAACATAAATAATATAGATATTATTCTAACACAAGCTGCAACCTATAACCATAGAAAAAT
TTTAACCTATTTCATTCCTCAATTAACCTACGCACAGATAGAACAATGTTTACTAGTGGCGATAAAAACAAAAGCTTCCAAGA
AAACCTTGAACTTACTACTGTCTCACCTAAACCTTTCCATCAAACTCATCAAAAAAATAAGCCAATATGTTGTCACTTACAAT
TCAACAAATATCATAAGCATTCTGAGTATGCGGCGGAAAAAGAAGATATATTTAGATATCATTTTGACAGAGTTTGTAAAAAA
CGCTATTTTTAATAAATTTGTCGTTCGATGTATGGATACATTTTCCATAAACCCGGAAAGAATTGTCAAAATGGCCGCACGAA
TAAATAGGATGATGTTAGTGAAAAATATATCTGAACGTGTTTGGAAAAATCATGCGGTTAAACTTAAACACCTTAAGCATGCG
GTACATACGATGAAGCATCAAGAAGGAAAAAATAGACTCATGAACTTTATCTATGATCACTGCTATTACCACATGCAAGGGGA
AGAGATCTTTGGCCTCGCAAGATTTTATGCAATCCATCATGCACCCAAGTTGTTTGACGTTTTTTATGATTGCTGCATGCTAG
ATGCTACACGATTTAAAAGCCTGCTTTTAGATTGTCCACATATCATAGGTAAAAACGCTTATGATGCTGGTATCAACCTCGTG
AACAAATATATTGGCAACCTATTTGCTATGGGGGTTCTTAGCAAAAAAGAAATCTTACAGGACTATCCATCTATCTATTCTAA
ACATGATATGTTTTAG

[0244] In an embodiment the attenuated ASFV of the invention comprises a functional version of MGF 505 1R. Suitably the functional version of MGF 505 1R comprises the sequence of SEQ ID No. 134, 135, 136, 137, 138, 139, 140, 141, 142, 143, 144, 145 or 146. Suitably the functional version of MGF 505 1R comprises a sequence having at least 70%, at least 80%, at least 90% or at least 95% identity with SEQ ID No. 134, 135, 136, 137, 138, 139, 140, 141, 142, 143, 144, 145 or 146. Suitably the functional version of MGF 505 1R consists of the sequence of SEQ ID No. 134, 135, 136, 137, 138, 139, 140, 141, 142, 143, 144, 145 or 146.

### MGF 505 2R Gene Sequences

Georgia 2007/1 MGF 505 2R (NC_044959.1:33119-34699)
SEQ ID No. 147
ATGTTTTCCCTTCAAGACCTTTGCCGAAAGCATCTTTTTATTCTTCCCGATGTTTTTGGCGAGCATGTACTACAACGATTAGG
ACTGTATTGGAGATGTCACGGCTCCCTTCAACGCATAGGAGACGACCACATACTCATACGACGGGATCTCATCCTTTCCACCA
ACGAGGCCTTAAGAATGGCGGGAGAGGAAGGAAACAATGAAGTAGTAAAGCTCTTGTTACTGTGGAAGGGAAATCTTCATTAC
GCCGTCATAGGAGCCTTGCAGGGTGATCAATATGACCTGATCCATAAGTATGAAAACCAAATCGGCGACTTTCATTTTATCTT
ACCATTGATTCAAGACGCGAATACGTTTGAAAAATGCCACGCTTTAGAACGTTTTTGTGGTGTTTCATGTCTGCTAAAACATG
CTACAAAATACAACATGCTCCCTATTCTCCAAAAATACCAAGAAGAGCTGTCTATGAGAGCGTATCTTCACGAAACCCTATTT
GAACTAGCATGCCTATGGCAGAGGTATGATGTCCTTAAATGGATAGAGCAAACCATACATGTTTACGACCTAAAGATTATGTT
TAATATTGCCATCTCCAAGAGGGATCTGACTATGTACTCCTTAGGATATATTTTCCTTTTTGATAGAGGGAACACCGAAGCTA
CGTTGCTAACGCAACATCTCAAGAAGACAGCGGCCAAAGGGCTCCTCCACTTTGTGCTAGAAACGTTAAAATACGGCGGCAAC
ATAGATACCGTCCTGACCCAAGCCGTAAAGTACAATCATAGAAAACTTTTAGATTATTTTCTGCGTCAACTACCTCGTAAACA
TATTGAAAAACTTTTGTTGCTGGCCGTGCAGGAAAAGGCTTCTAAAAAAACATTGAACTTACTGTTGTCACATTTAAACTACT
CCGTGAAACGCATCAAAAAACTACCGCGCTATGTGATAGAGTACGAGTCCACCTTGGTGATAAAGATTTTATTAAAAAAAAGA
GTGAACCTGATAGATGCCATGTTGGAAAAGATGGTAAGATATTTTTCTGCGACGAAAGTGAGGACGATCATGGATGAGCTTTC
GATTAGTCCGGAAAGAGTCATTAAGATGGCTATACAGAAAATGAGAACGGATATCGTAATCCATACTTCTTATGTTTGGGAGG
ATGATCTAGAACGTCTTACTCGTCTTAAAAATATGGTATACACCATAAAGTACGAACATGGGAAAAAAATGTTAATTAAAGTC
ATGCACGGCATATACAAAAACTTATTATACGGCGAAAGGGAAAAAGTCATGTTTTATTTAGCCAAGCTCTATGTTGCTCAAAA
CGCGGCCACCCAATTCAGAGACATTTGTAAGGACTGTTACAAACTGGATGTGGCACGGTTTAAACCGCGGTTTAAGCAACTAA
TATTAGACTGTTTAGAAATTATTACTAAAAAATCTTGCTATAGTATCCTGGAAATCTTAGAAAAACATATTATTTCCCTGTTT
ACTATGAAAGTTATGACTGAAGAAGAAAAAAACCTATGTTTAGAAATATTATATAAAGTAATTCATTATAAAACAATACAATG
TTAA
China/2018/AnhuiXCGQ MGF 505 2R
SEQ ID No. 148
ATGTTTTCCCTTCAAGACCTTTGCCGAAAGCATCTTTTTATTCTTCCCGATGTTTTTGGCGAGCATGTACTACAACGATTAGG
ACTGTATTGGAGATGTCACGGCTCCCTTCAACGCATAGGAGACGACCACATACTCATACGACGGGATCTCATCCTTTCCACCA
ACGAGGCCTTAAGAATGGCGGGAGAGGAAGGAAACAATGAAGTAGTAAAGCTCTTGTTACTGTGGAAGGGAAATCTTCATTAC
GCCGTCATAGGAGCCTTGCAGGGTGATCAATATGACCTGATCCATAAGTATGAAAACCAAATCGGCGACTTTCATTTTATCTT
ACCATTGATTCAAGACGCGAATACGTTTGAAAAATGCCACGCTTTAGAACGTTTTTGTGGTGTTTCATGTCTGCTAAAACATG
CTACAAAATACAACATGCTCCCTATTCTCCAAAAATACCAAGAAGAGCTGTCTATGAGAGCGTATCTTCACGAAACCCTATTT
GAACTAGCATGCCTATGGCAGAGGTATGATGTCCTTAAATGGATAGAGCAAACCATACATGTTTACGACCTAAAGATTATGTT
TAATATTGCCATCTCCAAGAGGGATCTGACTATGTACTCCTTAGGATATATTTTCCTTTTTGATAGAGGGAACACCGAAGCTA
CGTTGCTAACGCAACATCTCAAGAAGACAGCGGCCAAAGGGCTCCTCCACTTTGTGCTAGAAACGTTAAAATACGGCGGCAAC
ATAGATACCGTCCTGACCCAAGCCGTAAAGTACAATCATAGAAAACTTTTAGATTATTTTCTGCGTCAACTACCTCGTAAACA
TATTGAAAAACTTTTGTTGCTGGCCGTGCAGGAAAAGGCTTCTAAAAAAACATTGAACTTACTGTTGTCACATTTAAACTACT
CCGTGAAACGCATCAAAAAACTACCGCGCTATGTGATAGAGTACGAGTCCACCTTGGTGATAAAGATTTTATTAAAAAAAAGA
GTGAACCTGATAGATGCCATGTTGGAAAAGATGGTAAGATATTTTTCTGCGACGAAAGTGAGGACGATCATGGATGAGCTTTC
GATTAGTCCGGAAAGAGTCATTAAGATGGCTATACAGAAAATGAGAACGGATATCGTAATCCATACTTCTTATGTTTGGGAGG
ATGATCTAGAACGTCTTACTCGTCTTAAAAATATGGTATACACCATAAAGTACGAACATGGGAAAAAAATGTTAATTAAAGTC
ATGCACGGCATATACAAAAACTTATTATACGGCGAAAGGGAAAAAGTCATGTTTTATTTAGCCAAGCTCTATGTTGCTCAAAA
CGCGGCCACCCAATTCAGAGACATTTGTAAGGACTGTTACAAACTGGATGTGGCACGGTTTAAACCGCGGTTTAAGCAACTAA
TATTAGACTGTTTAGAAATTATTACTAAAAAATCTTGCTATAGTATCCTGGAAATCTTAGAAAAACATATTATTTCCCTGTTT
ACTATGAAAGTTATGACTGAAGAAGAAAAAAACCTATGTTTAGAAATATTATATAAAGTAATTCATTATAAAACAATACAATG
TTAA
Mkuzi 1979 MGF 505 2R (AY261362.1:34826-36406)
SEQ ID No. 149
ATGTTTTCCCTTCAAGACCTTTGCCGAAAGCATCTTTTTATTCTTCCCGATGTTTTTGGCGAGCATGTACTACAACGATTAGG
ACTGTATTGGAGATGTCACGGCTCCCTTCAACGCATAGGAGACGACCACATACTCATACGACGGGATCTCATCCTTTCCACCA
ACGAGGCCTTAAGAATGGCGGGAGAGGAAGGAAACAATGAAGTAGTAAAGCTCTTGTTACTGTGGAAGGGAAATCTTCATTAC
GCCGTCATAGGAGCCTTGCAGGGTGATCAATATGACCTGATCCATAAGTATGAAAACCAAATCGGCGACTTTCATTTTATCTT
ACCATTGATTCAAGACGCGAATACGTTTGAAAAATGCCACGCTTTAGAACGTTTTTGTGGTGTTTCATGTCTGCTAAAACATG
CTACAAAATACAACATGCTCCCTATTCTCCAAAAATACCAAGAAGAGCTGTCTATGAGAGCGTATCTTCACGAAACCCTATTT
GAACTAGCATGCCTATGGCAGAGGTATGATGTCCTTAAATGGATAGAGCAGACCATGCATGTTTACGACCTAAAGATTATGTT
TAATATTGCCATCTCCAAGAGGGATCTGACTATGTACTCCTTAGGATATATTTTCCTTTTTGATAGAGGGAACACCGAAGCTA
CGTTGCTAACGCAACATCTCGAGAAGACAGCGGCCAAAGGGCTCCTCCACTTTGTGCTAGAAACGTTAAAATACGGCGGCAAC
ATAGATACCGTCCTGACCCAAGCCGTAAAGTACAATCATAGAAAACTTTTAGATTATTTTCTGCGTCAACTACCTCGTAAACA
TATTGAAAAACTTTTGTTGCTGGCTGTTCAGGAAAAGGCTTCTAAAAAAACATTGAACTTACTGTTGTCACATTTAAACTACT
CCGTGAAACGCATCAAAAAACTGCTGCGCTATGTGATAGAGTATGAGTCCACCTTGGTGATAAAGATTTTGTTAAAAAAAAGA
GTAAACCTGATAGATGCCATGTTGGAAAAGATGGTAAGATATTTTTCTGCGACAAAAGTGAGGACGATCATGGATGAGCTTTC
GATTAGTCCGGAAAGAGTCATTAAGATGGCTATACAGAAAATGAGAACGGATATCGTAATCCATACTTCTTATGTTTGGGAGG
ATGATCTAGAACGTTTTACTCGTCTTAAAAATATGGTATACACCATAAAGTACGAACATGGGAAAAAAATGTTAATTAAAGTC
ATGCACGGCATATACAAAAACTTATTATACGGCGAAAGGGAAAAAGTCATGTTTCATTTAGCCAAGCTCTATGTTGCTCAAAA
TGCGGCCACCCAATTCAGAGACATTTGTAAGGACTGTTACAAACTGGATGTGGCACGGTTTAAACCGCGGTTTAAGCAACTAA
TATTAGACTGTTTAGAAATTGTTACTAAAAAATCTTGCTATAGTATCCTGGAAATCTTAGAAAAACATATTATTTCCCTATTT
ACTATGAAAGTTATGACTGAAGAAGAAAAAAACCTATGTTTAGAAATATTATATAAAGTAATTCATTATAAAACAATACAATG
TTAA
L60 MGF 505 2R (NC_044941.1:27701-29281)
SEQ ID No. 150
ATGTTTTCCCTTCAAGACCTTTGCCGAAAGCATCTTTTTATTCTTCCCGATGTTTTTGGCGAGCATGTACTACAACGATTAGG
ACTGTATTGGAGATGTCACGGCTCCCTTCAACGCATAGGAGACGACCACATACTCATACGACGGGATCTCATCCTTTCCACCA
ACGAGGCCTTAAGAATGGCGGGAGAGGAAGGAAACAATGAAGTAGTAAAGCTCTTGTTACTGTGGAAGGGAAATCTTCATTAC
GCCGTCATAGGAGCCCTGCAGGGTGATCAATATGACCTGATCCATAAGTATGAAAACCAAATCGGCGACTTTCATTTTATCTT
ACCATTGATTCAAGACGCGAATACGTTTGAAAAATGCCACGCTTTAGAACGTTTTTGTGGTGTTTCATGTCTGCTAAAACATG
CTACAAAATACAACATGCTCCCTATTCTCCAAAAATACCAAGAAGAGCTGTCTATGAGAGCGTATCTTCACGAAACCCTATTT
GAACTAGCATGCCTATGGCAGAGGTATGATGTCCTTAAATGGATAGAGCAGACCATGCATGTTTACGACCTAAAGATTATGTT
TAATATTGCCATCTCCAAGAGGGATCTGACTATGTACTCCTTAGGATATATTTTCCTTTTTGATAGAGGGAACACCGAAGCTA
CGTTGCTAACGCAACATCTCGAGAAGACAGCGGCCAAAGGGCTCCTCCACTTTGTGCTAGAAACGTTAAAATACGGCGGCAAC
ATAGATACCGTCCTGACCCAAGCCGTAAAGTACAACCATAGAAAACTTTTAGATTATTTTCTGCGTCAACTACCTCGTAAACA
TATTGAAAAGCTTTTGTTGCTGGCTGTTCAGGAAAAGGCTTCTAAAAAAACATTGAACTTACTGTTGTCACATTTAAACTACT
CCGTGAAACGCATCAAAAAACTGCTGCGCTATGTGATAGAGTATGAGTCCACCTTGGTGATAAAGATTTTGTTAAAAAAAAGA
GTAAACCTGATAGATGCCATGTTGGAAAAGATGGTAAGATATTTTTCTGCGACGAAAGTGAGGACGATCATGGATGAGCTTTC
GATTAGTCCGGAAAGAGTCATTAAGATGGCTATACAGAAAATGAGAACGGATATCGTAATCCATACTTCTTATGTTTGGGAGG
ATGATCTAGAACGTCTTACTCGTCTTAAAAATATGGTATACACCATAAAGTACGAACATGGGAAAAAAATGTTAATTAAAGTC
ATGCACGGCATATACAAAAACTTATTATACGGCGAAAGGGAAAAAGTCATGTTTCATTTAGCCAAGCTCTATGTTGCTCAAAA
TGCGGCCACCCAATTCAGAGACATTTGTAAGGACTGTTACAAACTGGATGTGGCACGGTTTAAACCGCGGTTTAAGCAACTAA
TATTAGACTGTTTAGAAATTGTTACTAAAAAATCTTGCTATAGTATCCTGGAAATCTTAGAAAAACATATTATTTCCCTATTT
ACTATGAAAGTTATGACTGAAGAAGAAAAAAACCTATGTTTAGAAATATTATATAAAGTAATTCATTATAAAACAATACAATG
TTAA
Benin 97/1 MGF 505 2R (NC_044956.1:27352-28932)
SEQ ID No. 151
ATGTTTTCCCTTCAAGACCTTTGCCGAAAGCATCTTTTTATTCTTCCCGATGTTTTTGGCGAGCATGTACTACAACGATTAGG
ACTGTATTGGAGATGTCACGGCTCCCTTCAACGCATAGGAGACGACCACATACTCATACGACGGGATCTCATCCTTTCCACCA
ACGAGGCCTTAAGAATGGCGGGAGAGGAAGGAAACAATGAAGTAGTAAAGCTCTTGTTACTGTGGAAGGGAAATCTTCATTAC
GCCGTCATAGGAGCCCTGCAGGGTGATCAATATGACCTGATCCATAAGTATGAAAACCAAATCGGCGACTTTCATTTTATCTT
ACCATTGATTCAAGACGCGAATACGTTTGAAAAATGCCACGCTTTAGAACGTTTTTGTGGTGTTTCATGTCTGCTAAAACATG
CTACAAAATACAACATGCTCCCTATTCTCCAAAAATACCAAGAAGAGCTGTCTATGAGAGCGTATCTTCACGAAACCCTATTT
GAACTAGCATGCCTATGGCAGAGGTATGATGTCCTTAAATGGATAGAGCAGACCATGCATGTTTACGACCTAAAGATTATGTT
TAATATTGCCATCTCCAAGAGGGATCTGACTATGTACTCCTTAGGATATATTTTCCTTTTTGATAGAGGGAACACCGAAGCTA
CGTTGCTAACGCAACATCTCGAGAAGACAGCGGCCAAAGGGCTCCTCCACTTTGTGCTAGAAACGTTAAAATACGGCGGCAAC
ATAGATACCGTCCTGACCCAAGCCGTAAAGTACAACCATAGAAAACTTTTAGATTATTTTCTGCGTCAACTACCTCGTAAACA
TATTGAAAAGCTTTTGTTGCTGGCTGTTCAGGAAAAGGCTTCTAAAAAAACATTGAACTTACTGTTGTCACATTTAAACTACT
CCGTGAAACGCATCAAAAAACTGCTGCGCTATGTGATAGAGTATGAGTCCACCTTGGTGATAAAGATTTTGTTAAAAAAAAGA
GTAAACCTGATAGATGCCATGTTGGAAAAGATGGTAAGATATTTTTCTGCGACGAAAGTGAGGACGATCATGGATGAGCTTTC
GATTAGTCCGGAAAGAGTCATTAAGATGGCTATACAGAAAATGAGAACGGATATCGTAATCCATACTTCTTATGTTTGGGAGG
ATGATCTAGAACGTCTTACTCGTCTTAAAAATATGGTATACACCATAAAGTACGAACATGGGAAAAAAATGTTAATTAAAGTC
ATGCACGGCATATACAAAAACTTATTATACGGCGAAAGGGAAAAAGTCATGTTTCATTTAGCCAAGCTCTATGTTGCTCAAAA
TGCGGCCACCCAATTCAGAGACATTTGTAAGGACTGTTACAAACTGGATGTGGCACGGTTTAAACCGCGGTTTAAGCAACTAA
TATTAGACTGTTTAGAAATTGTTACTAAAAAATCTTGCTATAGTATCCTGGAAATCTTAGAAAAACATATTATTTCCCTATTT
ACTATGAAAGTTATGACTGAAGAAGAAAAAAACCTATGTTTAGAAATATTATATAAAGTAATTCATTATAAAACAATACAATG
TTAA
Tengani 62 MGF 505 2R (AY261364.1:28261-29830 )
SEQ ID No. 152
ATGTTTTCCCTTCAAGACCTTTGCCGAAAGCATCTTTTTATTCTTCCCGATGTTTTTGGCGAGCATGTACTACAACGATTAGG
ACTGTATTGGAGATGTCACGGCTCCCTTCAACGCGTAGGAGACGACCACATACTCATACGGCGGGATCTCATCCTTTCCACCA
ACGAGGCCTTAAGAATGGCGGGAGAGGAAGGAAACAATGAAGTAGTAAAGCTCTTGTTACTGTGGAAGGGAAATCTTCATTAC
GCCGTCATAGGAGCCTTGCAGGGTGATCAATATGACCTGATCCATAAGTATGAAAACCAAATCGGCGACTTTCATCTTATCTT
ACCATTGATTCAAGACGCGAAAACGTTTGAAAAATGCCATGCTTTAGAACGTTTTTGTGGTGTTTCATGTCTGCTAAAACATG
CTACAAAATACAACATGCTCCCTGTTCTCCAAAAATACCAAGAAGAGCTGTCCATGAGAGCATATCTTTGCGAAACCCTATTT
GAACTAGCATGCCTATGGCAGAGGTATGATGTCCTTAAATGGATAGAGCAAACCATGCATGTTTACGACCTAAAGATTATGTT
TAATATTGCCATCTCCAAGAGGGATCTGACTATGTACTCCTTAGGATATATTTTCCTTTTTGATAGAGGGAACACCGAAGCTA
CGTTGCTAACGCAATATCTCGAGAAGACAGCGGCCAAAGGGCTCCTCCACTTTGTGCTAGAAACGTTAAAATACGGCGGTAAC
ATAGATATTGTCCTGACCCAAGCCGTAAAGTACAATCATAGAAAACTTTTAGATTATTTTCTGCGTCAACTACCTCGTAAACA
TATTGAAAAGCTTTTGTTGCTGGCCGTGCAGGAAAAGGCTTCTAAAAAAACATTGAACTTACTGTTGTCACATTTAAACTACT
CCGTGAAACGCATCAAAAAACTGCTGCGCTATGTGATAGAGTACGAGTCCACCTTGGTGATAAAGATTTTATTAAAAAAAAGA
GTAAACCTGATAGATGCCATGTTGGAAAAGATGGTAAGATATTTTTCTGCGACGAAAGTGAGGACGATCATGGATGAGCTTTT
GATTAGTCCGGAAAGAGTCATTAAGATGGCTATACAGAAAATGAGAACGGATATCGTAATCCATACTTCTTATGTATGGGAGG
ATGATCTAGAACGACTTACTCGTCTTAAAGATATGGTATACACCGTAAAGTACGAACATGGGAAAAAAATGTTAATTAAAGTC
ATACACGGCATATACAAAAACTTATTATACGGCGAAAAAGAAAAGGTCATGTTTCATTTAGCCAAGCTCTATGTTGCTCAAAA
CGCGGCCACCCAATTCAGAGACATTTGTAAGGACTGTTACAAACTGGATGTGGCACGGTTTAAACCGCGGTTTAAGCAACTAA
TGTTAGACTGTTTAGAAATTGTTACTAAAAAATCTTGCTATAGTATTCTGGAAATCTTAGAAAAACATATGATTTCCCTATTT
ACTATGAAAGTTATGACTGAAGAAGAAAAAAACCTATGTTTAGAAATATTATATAAGTAA
Pretorisuskop/96/4 MGF 505 2R (AY261363.1:33795-35374)
SEQ ID No. 153
ATGTTTTCCCTTCAAGACCTTTGCCGAAAGCATCTTTTTATTCTTCCCGATGTTTTTGGCGAGCATGTACTACAACGATTAGG
ACTGTATTGGAGATGTCACGGCTCCCTTCAACGCGTAGGAGACGACCACATCCTCATACGGCGGGATCTCATCCTTTCCACCA
ACGAGGCCTTAAGAATGGCGGGAGAAGAAGGAAACAATGAAGTAGTAAAGCTCTTGTTACTGTGGAAGGGAAATCTTCATTAC
GCCATCATAGGAGCCTTGCAGGGTGATCAATATGACCTGATCCATAAGTATGAAAACCAAATCGGCGACTTTCATCTTATCTT
ACCATTGATTCAAGATGCGAAAACGTTTGAAAAATGCCACGCTTTAGAACGTTTTTGTGGTGTTTCATGTCTGCTAGAACATG
CTACAAAATACAACATGCTCCCTATTCTCCAAACATACCAAGAAGAGCTGTCTATGAGAGCATATCTTCGCGAAACCCTATTT
GAACTAGCGTGCCTGTGGCAGAGGTATGATGTCCTTAAATGGATAGAGCAAACCATGCATGTTTACGACCTAAAGATTATGTT
TAATATTGCCATCTCCAAGAGGGATCTGACGATGTATTCCTTAGGATATATTCTTCTTTTTGATAGAGAGAACACCGAAGCTA
CGTTGTTAACACAACATCTCGAGAAGACAGCGGCCAAAGGGCTCCTCTACTTTGTGCTAGAAACGTTAAAATACGGCGGTAAC
ATAGATATCGTCCTGACTCAAGCCGTAAAGTACAATCATAGAAAACTTTTAGATTATTTTCTGCGTCAACTACCTCGTAAACA
TATTGAAAAGCTTTTGTTGCTGGCCGTGCAGGAAAAGGCTTCTAAAAAAACATTGAACTTACTGTTGTCCCATCTAAACTACT
CCGTGAAACGTATCAAAAAACTGCTGCGCTATGTGATAGAGTACGAGTCCACCTTGGTGATAAAGATTTTATTAAAAAAAAGA
GTAAACCTGATAGATGCCATGTTGGAAAAGATGGTAAGATATTTTTCTGCGACGAAAGTGAGGACGATCATGGATGAGCTTTT
GATTAGTCCGGAAAGAGTCATTAAGATGGCTATACAGAAAATGAGAACGGATATCGTAATCCATACTTCTTATGTTTGGGAGG
ATGATCTAGAACGACTTACTCGTCTTAAAAATATGGTATACACCATAAAGTACGAACATGGGAAAAAAATGTTAATTAAAGTC
ATGCACGGCATATACAAAAACTTATTATACGACGAAAGAGAAAAGGTCATGTTTCATTTAGCCAAGCTCTATGTTGCTCAAAA
CGCGGCCACCCAATTCAGAGACATTTGTAAGGACTGTTACAAACTGGATGTGGCACGGTTTAAACCGCGGTTTAAGCAACTAA
TGTTAGACTGTTTAGAAATTGTTACTAAAAAATCTTGCTATAGTATCCTGGAAATCTTAGAAAAACATATTATTTCCCTATTT
ACTATGAAAGTTATGACTGAAGAGGAAAAAAACCTATGTTTAGAAATATTATATAAGTAA
Warmbaths MGF 505 2R (AY261365.1:33029-34597)
SEQ ID No. 154
ATGTTTTCCCTTCAAGACCTTTGCCGAAAGCATCTTTTTATTCTTCCCGATGTTTTTGGCGAGCATGTATTACAACGATTAGG
ACTGTATTGGAGATGTCACGGCTCCCTTCAACGCGTAGGAGACGACCACATACTCATACGGCGGGATCTCATCCTTTCCACCA
ACGAGGCCTTAAGAATGGCGGGAGAAGAAGGAAACAATGAAGTAGTAAAGCTCTTGTTACTGTGGAAGGGAAATCTTCATTAC
GCCATCATAGGAGCCTTGCAGGGTGATCAATATGACCTAATCCATAAGTATGAAAACCAAATCGGCGACTTTCATCTTATCTT
ACCATTGATTCAAGATGCGAAAACGTTTGAAAAATGCCACGCTTTAGAACGTTTTTGTGGTGTTTCATGTCTGCTAAAACATG
CTACAAAATACAACATGCTCCCTATTCTCCAAACATACCAAGAAGAGCTGTCTATGAGAGTATATCTTCGCGAAACCCTATTT
GAACTAGCATGCCTATGGCAGAGGTATGATGTCCTTAAATGGATAGAGCAAACCATGCATGTTTACGACCTAAAGGTTATGTT
TAATATTGCCATCTCCAAGAGAGATCTGACTATGTATTCCTTAGGATATATTCTTCTTTTTGATAGAGAGAACACCGAAGCTA
CGTTGCTAACGCAACATCTCGAGAAAACAGCGGCCAAGGGGCTCCTCCACTTTGTGCTAGAAACGTTAAAATACGGCGGTAAC
ATAGATATCGTCCTGTCCCAAGCCGTAAAGTACAATCATAGAAAACTTTTAGATTATTTTCTGCGTCAACTACCTCGTAAAAA
TATTGAAAAACTTTTGTTGCTGGCTGTTCAGGAAAAGGCTTCTAAAAAAACATTGAACTTACTGTTGTCCCATTTAAACTACT
CCGTGAAACGCATCAAAAAACTGCTGCGCTATGTGATAGAGTACGAGTCCACCTTGGTGATAAAGATTTTATTAAAAAAAAGA
GTAAACCTGATAGATGCCATGTTGGAAAAGATGGTAAGATATTTTTCTGCGACGAAAGTGAGGACGATCATGGATGAGCTTTC
GATTAGTCCGGAAAGAGTCATTAAGATGGCTATACAGAAAATGAGAACAGATATCGTAATCCATACTTCTTATGTTTGGGAGG
ATGATCTAGAACGACTTACTCGTCTTAAAAATATGGTATACGCCATAAAGTATGAACATGGGAAAAAAATGTTAATGAAAGTC
ATGCACGGCATATACAAAAACTTATTATACGGCGAAAGAGAAAAGGTCATGTTTCATTTAGCCAAGCTCTATGTTGCTCAAAA
CGCGGCCACCCAATTCAGAGACATTTGTAAGGACTGTTACAAACTGGATGTGGCACGGTTTAAGCAACTAACGTTAAACTGTT
TAGAAATTATTACTAAAAAATCTTGCTATAGTATCCTGGAAATCCTAGAAAAACATATTATTTCCCTATTTACTATGAAAGTT
ATGACTGAAGAAGAAAAAAACCTATGTTTAGAAATATTATATAAAGTAATTCATTATAATACAATACAATGTTAA
Malawi Lil-20/1 (1983) MGF 505 2R (AY261361.1:31541-33121)
SEQ ID No. 155
ATGTTTTCCCTTCAAGATCTTTGCCGAAAGCATCTTTTTATTCTTCCCGATGTTTTTGGCGAGCATGTACTACAACAGTTAGG
ACTGTACTGGAAACGTCACGGCTCTCTTCAACGCATAGGAGACGACCACATACTCATACGGCGGGACCTCATCCTTTCCACCA
ACGAGGCCTTAAAAATGGCGGGAGAGGAAGGAAACAATGAAGTAGTAAAGCTCTTGTTACTGTGGGAGGGAAACCTTCATTAT
GCCATCATAGGGGCCTTACAGGGTGATCAATATGATCTGATCCATAAGTATGAAAACCAAATCGAAGACTATCATCATATCTT
GCCATTGATTCAAGATGCGAAAACGTTTGAAAAATGCCACGCCTTAGAACGTTTTTGTGATGTTCCATGTCTGCTAGAACATG
CTACAAAACACAACATGCTCCCTATTCTCCAAAAATACCAAGAAGAGCTGTCTATAAGAGTGTATCTTCGCGAAACCCTATTC
GAACTAGCATGCCTATGGCAGAGGTATGATGTTCTTAAATGGATAGAGCAAACCATGCATGTTTACGACCTAAAGATTATGTT
TAATATTGCCATCTCCAAGAGGGATCTAAGCATGTACTCCTTAGGATATGTTCTCCTTTTTGATAGAGGAAACATCGAAGCTA
CGTTCCTAACGCAACATCTCGAGAAGACAGCGGCCAAAGGGCTCCTCCACTTTGTGCTAGAAACGTTAAAATACGGCGGTAAC
TTAAATATCGTCCTGTCCCAAGCCGTAAAATACAATCATAGAAAACTTTTGGATTATTTTCTGCGTCAACTACCTCGTAAAAA
TATTGAAAAACTTTTGTTGCTGGCCGTGCAGGAAAAGGCTTCTAAAAAAACATTGAACCTACTGTTGTCACACTTAAACTACT
CCGTGAAACACATCAAAAAACTGCTGCGCTATGTGATAGAGTACGAGTCTACCTTGGTGATAAAACTTTTATTGAAAAAAAGA
GTAAACCTGATAGACGCCGTGTTGGAAAAGAATGTAAGATATTTTTCTGCGATTAAAGTGAGGACTATTATGGATGAGCTTTC
GATTAGTCCGGAAAGAGTCATTAAGATGGCCATACAGAAAATGAGAACGGATATTGTGATTCAGACTTCTTATATTTGGGAGG
ATGATCTAGAAAGACTTATTCGTCTTAAAAATATGGTATACACCATAAAGTATGAACATGGGAAAAAAATGTTAATTAAAGTT
ATTCACGGCATATACAAAAACTTATTATACGGCGAAAAAGAAAAAGTCATGTTTCATTTAGCCAAACTCTATGTTGCTCAAAA
CGCGGCCACCCAATTCAGGGACATTTGTAAGGACTGTTGCAAACTGGATGTGGCGCGGTTTAAACCGCGGTTTAAACAACTAA
TTTTAGACTGTTTAGAAATGGTTACTAAAAAATCTTGCTTTAGTATTATAGAAATCTTAGAAAACTATATTATTTCCCTATTT
GTGATGAAAGTCATCACTGAAGAAGAAAAAAACCTATGTTTAGAACTATTATATAAAGTAATTAGTTACAAAACGATATAATG
TTAA
Ken05/Tk1 MGF 505 2R (NC_044945.1:35094-36674)
SEQ ID No. 156
ATGTTTTCCCTTCAAGACCATTGCCGAAAGCATCTTTTTATTCTTCCCGATGTTTTTGGCGAGCATGTACTACAACGGTTAGG
ACTGTACTGGGGACGTCACGGCTCTCTTCAACGAATCGGGGACGATCACATACTCATACGGCGGGACCTCATCCTTTCCACCA
ACGAGGCCTTAAAAATGGCGGGAGAAGAAGGAAACAATGAAGTAGTAAAGCTCTTGTTACTGTGGGAGGGAAATCTTCATTAT
GCTATCATAGGGGCTTTACAGGGTGATCAATATGACCTAATCCATAAGTATGAAAACCAAATCGAAGACTATCATCATATCTT
ACCATTGATTCAAGATGCGGAAACGTTTGAAAAATGCCACGCCTTAGAACGTTTTTGTGATGTTCCATGTCTGCTAGAACATG
CTACAAAACACAACATGCTCCCTATTCTCCAAAAATATCAAGAAGAGTTGTCTATAAGAGTGTATCTACGCGAAACCCTATTC
GAACTAGCATGCCTATGGCAGAGGTATGATATTCTTAAATGGATAGAGCAAACCATGCATGTTTACGATCTAAAAATTATATT
TAATATTGCCATCTCCAAGAGGGATCTAAGCATGTACTCCTTAGGATATGTTCTCCTTTTTGATAGAGGGAACACCGAAGCTA
CCTTGTTAACGCAACACCTCGAGAAGACAGCGGCCAAGGGGCTCCTCCACTTTGTGCTAGAAACGTTAAAATACGGCGGTAAC
TTAAATATCGTCCTGTTCCAAGCCGTAAAATACAATCATAGAAAACTTTTAGATTATTTTCTGCGTCAACTACCCCGTAAAAA
TATTGAAAAACTTTTGTTGCTGGCTGTGCAGGAAAAAGCTTCTAAGAAAACATTGAACTTACTGTTGTCACATTTAAACTACT
CCGTGAAACGCATCAAAAAACTGCTGCGCTATGTGATAGAGTACGAGTCTACCTTGGTGATAAAGATTTTATTAAAAAAAAGA
GTAAACCTAATAGACGCCGTGTTGGAAAAGACTGTAAGATATTTTTCTGAGACGAAAGTAAAGACTATTATGGATGAGCTTTC
GATTAATCCGGAAAAAGTCATTAAGATGGCCATACAGAAAATGAGAACGGATATTGTGATCCAAACTTCTTATATTTGGGAGG
ATGATCTAGAAAGACTTATTCGTCTTAAAAATATGGTATACACCATAAAGTATGAACATGGGAAAAAAATGTTAATGAAAGTT
ATTCACGGCATATACAAAAACTTATTACACGATGAAAAAGAAAAAGTCATGTTTCATTTAGCCAAGTTCTATATTGCTCAAAA
CGCGGCCACCCAATTCAGAGACATTTGTAAAGACTGTTGCAAACTGGATGTGGCGCGGTTTAAACCGCGGTTTAAACAACTAA
TTTTAGACTGTTTAGAAATTGTTACTAAAAAATCTTGCTTTAGTATTATAGAAATTTTAGAAAACCATATTATTTCCCTATTT
ATGATGAAAGTTATCACTGAAGATGAAAAAAACCTAGGTTTAGAATTATTATATAAAGTAATTAGTTACAAAATGATATCATA
TTAA
Kenya 1950 MGF 505 2R (AY261360.1:37419-38999)
SEQ ID No. 157
ATGTTTTCCCTTCAAGACCTTTGCCGAAAGCATCTTTTTATTCTTCCCGATGTTTTTGGCGAGCACGTACTACAACAATTGGG
GCTGTACTGGGAAAAACACGGCTCTCTTCAACGAATAGGGAACGATCACATACTCATACGGGGGATCTCATCCTTTCTATCA
ACGAGGCCTTAAAAATAGCGGCAGAGGAAGGAAACAATGAAGTAGTAAAGCTTTTGTTACTATGGAAGGGAAATCTTCATTAT
GCCATCATAGGAGCTTTGGAGGGTGACCAATATGACCTGATCTATACGTATGAAAACCAAATTGAAGACTATCATCATATCTT
GCCATTGATTCAAGATGCGAAAACGTTTGAAAAATGCCACGCCTTGGAACGTTTTTGTGATGTTCCATGCCTGCTAGAGCATG
CTATAAAACACAACATGCTCCCTATTCTCCAAAAATATCAAGAAGAACTGTTTATAAGAGTGTATCTCCGCGAAACCCTATTT
GAACTAGCATGCCTATGGCAGAGGTATGATATTCTTAAATGGATAGAGCAAACCATGCATGTTTACGATCTAAAAATTATATT
TAATATTGCCATCTCCAAGAGGGATCTAAGCATGTACTCCTTAGGATATGTTCTCCTTTTTGATAGAGGGAACACCGAAGCTA
CCTTGTTAACGCAACACCTCGAGAAGACAGCGGCCAAGGGGCTCCTCCACTTTGTGCTAGAAACGTTAAAATACGGCGGTAAC
ATAAACATCGTCCTATCCCAAGCCGTAAAATACAATCATAGGAAACTTTTAGATTATTTTCTGCGTCAACTACCTCGTAAAAA
TATTGAAAAACTTTTGTTGTTAGCCGTACAGGAAAAGGCTTCTAAGAAAACATTGAACTTACTGTTGTCTTATTTAAACTACT
CCGTGAAACGCATCAAAAAACTGCTGCGCTATGTGATAGAGTACGAGTCCACACTGGTGATAAGGATTTTATTAAAAAAAAGA
ATAAACCTAATAGACGCCGTGTTGGAAAAGACTGTAAGATATTTTTCTGAGACGAAAGTAAAGACTATTATGGATGAGCTTTC
GATTAATCCGGAAAAAGTTATTAAGATGGCCATACAGAAAATGAGAACGGATATTGTGATCCAAACTTCTTATATTTGGGAGG
ATGATCTAGAAAGACTTATTCGTCTTAAAAATATGGTATACACCATAAAGTATGAACATGGGAAAAAAATGTTAATGAAAGTT
ATTCACGGCATATACAAAAACTTATTACACGATGAAAAAGAAAAAGTCATGTTTCATTTAGCCAAGTTCTATATTGCTCAAAA
CGCGGCCACCCAATTCAGAGACATTTGTAAAGACTGTTGCAAACTGGATGTGGCGCGGTTTAAACCGCGGTTTAAACAACTAA
TTTTAGACTGTTTAGATATTATTACTAAAAAAACGTGCCTCAATATTATGGAAATCTTAGAAAATCATATTATTTCGCTATTT
GCTATGAAAATGATGACTGAAGATGAAAAAAACCTAGGTTTAGAATTATTATATAAAGTAATTAGTTACAAAATGATATCATA
TTAA
Ken06.Bus MGF 505 2R (NC_044946.1:31225-32799)
SEQ ID No. 158
ATGTTTTCCCTTCAAGACCTTTGCCGAAAGCATCTTTTTATTCTTCCCGATGTTTTTGGCGAGCATGTACTACAACAATTGGG
GCTGTACTGGGAAAAACACGGCTCTCTTCAACGAATAGGGAACGATCACATACTCATACGGCGGGATCTCATCCTTTCTATCA
ACGAGGCCTTAAAAATAGCGGCAGAGGAAGGAAACAATGAAGTAGTAAAGCTCTTGTTACTGTGGAAGGGAAATCTTCATTAT
GCCATCATAGGAGCCTTGCAGGGTGACCAATATGACCTCATCCATACGTACGAAAACCAAATCGAAGACTATCATCATATCTT
GCCATTGATTCAAGATGCGAAAACGTTTGAAAAATGCCACGCCTTGGAACGTTTTTGTGATGTTCCATGCCTACTAGAACATG
CTACAAAACACAACATGCTCCCTATTCTCCAAAAATACCAAGAAGAGCTGTTTATAAGAGTGTATCTCCGCGAAACCCTATTT
GAACTAGCATGCCTATGGCAGAGGTATGATATCCTTAAATGGATAGAGCAAACCATGCATGTTTACGACCTAAAGATTATGTT
TAATATTGCCATCTCCAAGAGGGATCTAAGCATGTACTCTTTAGAATATATTCTCTTTTTTAATAGAGGGAACACCGATGTTG
CGTTAGCAACGTTGCTAACGCAACATCTCGAGAAGACAGCGGCCAAGGGGCTCCTCCACTTTGTGCTAGAAACGTTAAAATAC
GGCGGTAACATAAACATCGTCCTCTCCCAAGCCGTAAAATACAATCATAGAAAACTTTTAGATTATTTTCTGCGTCAACTACC
TCGTAAAAATATTGAAAAACTTTTGTTGCTGGCCGTACAGGAAAGGGCTTCTAAGAAAACATTGAACTTACTGTTGTCTTATT
TAAACTACTCCGTGAAACGCATCAAAAAACTGCTGCGCTATGTGATAGAGCATGAGTCCACACTGGTGATAAGGATTTTATTA
AAAAAAAGAATAAACCTAATAGACGCCGTGTTGGAAAAGACTGTAAGATATTTTTCTATGACTAAAGTGAGGACGATCATGGA
TGAGCTTTCGATTAATCCGGAAAAAGTCATTAAAATGGCCGTGCAGAAAATGAGAACGGATATCGTGATCCATACTTCTTATG
TTTGGGAGGATGATCTAGAAAGACTTATTCGTCTTAAAAATATGCTATACACTATAAAGTATGAGCATGGAAAAAAAATGCTA
ATTAAAGTCATTCACGGCATATACAAAAACTTATACGGCGAAAAAGAAAAAGTCATGTTTAATTTGGCCAAGTTCTATGCTGC
TCAAAACGCGGCCACCCAATTCAAAGACACTTGTAAAGACTGTTGCAAACTGGATGTGGCGCGGTTTAAACAACTAATTTTAG
ACTGTTTAGACATTATTACTAAAAAAACGTGCCTCAGTATCATGGAAATCTTAGAAAATCATATTATTTCGCTATTTGCTATG
AAAATGATGACGGAGGATGAAAAAAACTTAGGTTTAGAAATATTATATAAAGTAATTAGTTACAAAATGATATCATATTAA

[0246] In an embodiment the attenuated ASFV of the invention comprises a functional version of MGF 505 2R. Suitably the functional version of MGF 505 2R comprises the sequence of SEQ ID No. 147, 148, 149, 150, 151, 152, 153, 154, 155, 156, 157 or 158. Suitably the functional version of MGF 505 2R comprises a sequence having at least 70%, at least 80%, at least 90% or at least 95% identity with SEQ ID No. 147, 148, 149, 150, 151, 152, 153, 154, 155, 156, 157 or 158. Suitably the functional version of MGF 505 2R consists of the sequence of SEQ ID No. 147, 148, 149, 150, 151, 152, 153, 154, 155, 156, 157 or 158.

### MGF 505 6R Gene Sequences

Benin 97/1 MGF 505 6R
SEQ ID No. 257
ATGTTCTCCCTACAGGACCTCTGTCGGAAGAACACTTTCTTCCTTCCAAATGATTTTAGCAAGCATACTCTACAACGGCTGGG
GTTGTATTGGAAAGAGCATGGATCCGTCCATCGAATAGAAAAGGACAGCATAATGATACAGAATGAATTGGTTCTTTCTATCA
ATGATGCTTTACAGCTTGCAGGAGAGGAGGGGGACACAGATGTGGTACAGCTCTTGTTACTATGGGAGGGAAATCTGCATTAT
GCCATCATAGGAGCTTTGAAGACTGAGAATTATAATCTAGTATGTGAGTACCATAGCCAAATTCAGGACTGGCATATTCTCCT
ACCCTTGATTCAAGATCCAGAAACATTCGAAAAATGTCATGATTTAAGCCTTGGATGTGACCTTATATGCCTTCTCCAACATG
CTGTAAAATGTGATATGCTTTCTATTCTTGTTAAATATAAGGAGGATTTACTAAATGTAAGGATTAGGCATCGTACCCAATCC
CTGTTTGTTTTGGCATGCGAAAATCGGAGATTTGAGATTATTGAATGGATAGGTCAAAATCTGTCAATTCCTGAACCTGAGGC
CATTTTTAGCATTGCTATTGTTACAAAAGATGTAGAACTGTTTTCCTTAGGATATAAAATTATTTTTGATTACATGCAAAGAC
AAGGAATTTTTCAATTAACCAATGTAGTTCGCATGCTTCTGCTAAATCGTCATATTGGTATGGCAATAGAAAAAGGACTTTTA
CCTTTTATTCTGGAAACTTTAAAATATGGTGGTAGTGTAAAAAGAGCTTTATCTTATGCAGTAATAGATAATAAAAGAAAAAT
TATAGACTATCTTGTACGCCATGAAAATATACCCCGAGGAACTATTGAAAGACTTTTGCATCTAGCTGTGAAAAAACAATCTT
CCAGGAAAACTTTGAACTTGTTGCTATCTTACATAAATTACAAGGTGAAAAATGTTAAAAAGCTGGTAGAGCATGTAGTAGAT
CACAAATCCACTCTTGTGTTAAAAATTTTATTGGAAAAAAAGGAAAATCTAGTGGATGCTGTTTTAACAAGACTTGTAAAACA
TTCTACATATTTCCAGGTGAGAGAATTTATCCAGGAGTTTTCCATCAGCCCAGAAAAATTCATTAAAATAGCTGTGCGGGAAA
AGAAAAATGTGTTAATCGAGGCTATTTCTGAAGATATTTGGGAAAATCCCACAGAAAGAATTACTTATCTCAAACAGATAGTG
CACACCATAAAATATGAAAGTGGAAGGCGGTTTTTGATAGACATCATTCACAGCATTTACCAAAGTTACTCACTAAAACACGA
AGATATTCTTAAACTGGCAACATTTTATGTCAAACACAATGCAATCACCCATTTTAAAGATCTCTGCAAATATCTTTGGCTGA
ACAGAGGAACAGAAAGTAAGAAACTGTTTTTAGAGTGCTTGGAAATTGCTGATGAGAAGGAGTTTCCTGATATTAAAAATATT
GTGAGTGAATATATTAACTACTTGTTTACTGCAGGAGCTATTACCAAGGAAGAAATCATGCAAGCTTATGCTTTAGAGTATGA
CATGTATTAA
L60 MGF 505 6R
SEQ ID No. 258
ATGTTCTCCCTACAGGACCTCTGTCGGAAGAACACTTTCTTCCTTCCAAATGATTTTAGCAAGCATACTCTACAACGGCTGGG
GTTGTATTGGAAAGAGCATGGATCCGTCCATCGAATAGAAAAGGACAGCATAATGATACAGAATGAATTGGTTCTTTCTATCA
ATGATGCTTTACAGCTTGCAGGAGAGGAGGGGGACACAGATGTGGTACAGCTCTTGTTACTATGGGAGGGAAATCTGCATTAT
GCCATCATAGGAGCTTTGAAGACTGAGAATTATAATCTAGTATGTGAGTACCATAGCCAAATTCAGGACTGGCATATTCTCCT
ACCCTTGATTCAAGATCCAGAAACATTCGAAAAATGTCATGATTTAAGCCTTGGATGTGACCTTATATGCCTTCTCCAACATG
CTGTAAAATGTGATATGCTTTCTATTCTTGTTAAATATAAGGAGGATTTACTAAATGTAAGGATTAGGCATCGTACCCAATCC
CTGTTTGTTTTGGCATGCGAAAATCGGAGATTTGAGATTATTGAATGGATAGGTCAAAATCTGTCAATTCCTGAACCTGAGGC
CATTTTTAGCATTGCTATTGTTACAAAAGATGTAGAACTGTTTTCCTTAGGATATAAAATTATTTTTGATTACATGCAAAGAC
AAGGAATTTTTCAATTAACCAATGTAGTTCGCATGCTTCTGCTAAATCGTCATATTGGTATGGCAATAGAAAAAGGACTTTTA
CCTTTTATTCTGGAAACTTTAAAATATGGTGGTAGTGTAAAAAGAGCTTTATCTTATGCAGTAATAGATAATAAAAGAAAAAT
TATAGACTATCTTGTACGCCATGAAAATATACCCCGAGGAACTATTGAAAGACTTTTGCATCTAGCTGTGAAAAAACAATCTT
CCAGGAAAACTTTGAACTTGTTGCTATCTTACATAAATTACAAGGTGAAAAATGTTAAAAAGCTGGTAGAGCATGTAGTAGAT
CACAAATCCACTCTTGTGTTAAAAATTTTATTGGAAAAAAAGGAAAATCTAGTGGATGCTGTTTTAACAAGACTTGTAAAACA
TTCTACATATTTCCAGGTGAGAGAATTTATCCAGGAGTTTTCCATCAGCCCAGAAAAATTCATTAAAATAGCTGTGCGGGAAA
AGAAAAATGTGTTAATCGAGGCTATTTCTGAAGATATTTGGGAAAATCCCACAGAAAGAATTACTTATCTCAAACAGATAGTG
CACACCATAAAATATGAAAGTGGAAGGCGGTTTTTGATAGACATCATTCACAGCATTTACCAAAGTTACTCACTAAAACACGA
AGATATTCTTAAACTGGCAACATTTTATGTCAAACACAATGCAATCACCCATTTTAAAGATCTCTGCAAATATCTTTGGCTGA
ACAGAGGAACAGAAAGTAAGAAACTGTTTTTAGAGTGCTTGGAAATTGCTGATGAGAAGGAGTTTCCTGATATTAAAAGTATT
GTGAGTGAATATATTAACTACTTGTTTACTGCAGGAGCTATTACCAAGGAAGAAATCATGCAAGCTTATGCTTTAGAGTATGA
CATGTATTAA
China/2018/AnhuiXCGQ MGF 505 6R
SEQ ID No. 259
ATGTTCTCCCTACAGGACCTCTGTCGGAAGAACATTTTCTTCCTTCCAAATGATTTTAGCAAGCATACCCTACAATGGCTGGG
ATTATATTGGAAAGAGCATGGATCCGTCCATCGAGCAGAAAAAGACAGCATAATGATACAGAATGAATTGGTTCTTTCTATCA
ATGATGCTTTACAGCTTGCAGGAGAGGAGGGGGACACAGATGTAGTACAGCTCTTGTTATTATGGGAGGGAAATCTGCATTAT
GCCATCATAGGAGCCTTGAAGACTGAAAAATATAACCTAATATGTGAGTATCATAGCCAAATTCAGGACTGGCATATTCTCCT
ACCCATGATTCAAGATCCAGAAACATTCGAAAAATGTCATGATTTAAGCCTTGGATGTGACTTTATTTGCCTTCTCCAACATG
CTGTAAAATACAACATGCTTTCTATTCTTGTCAAATATAAGGAGGATCTACTAAATGCAAGGATTAGGCATCGTATCCAATCC
CTGTTTGTTTTGGCATGCGAAAATCGGAGAATTGAAATTATTGATTGGATAGGCCAAAATCTGCCAATTCCTGAACCTGATGC
CATTTTTAGCATTGCTGTTGCTACAAGAGATTTAGAACTGTTTTCCTTAGGGTACAAGATTATTTTTGATTACATGCAAAGAC
AGGGAATCATTCAATTAACCAATGGAGTTCGCATGGTTGTGCTAAATCGTCACATTAGCATGGCAATAGATAATGGTCTTTTA
CCTTTTGTTCTGGAAACTTTAAAACATGGTGGGAATATACATAGAGCCTTATCTTATGCAGTAACACACAATAGAAGAAAAAT
TCTGGATTATCTTATTCGCCAGAAAAATATAGCCCCTAATACAATTGAAAGACTTTTATATCTGGCCGTGAAAAATCAATCTT
CCAGGAAAACTTTGAACTTGTTGCTATCTTACATAAATTACAAGGTGAAAAATGTTAAAAAGCTGGTAGAGCATGTAGTAAAT
GAGAAATCCACTCTTGTGTTAAAAATTTTATTAGAAAAAAAGGAAAATCTAGTGGATGCTGTTTTAACAAGACTTGTAAAACA
TTCTACATATTTCCAGGTGAGAGAATTTATCCAGGAGTTTTCCATCAGCCCAGAAAAATTCATTAAAATAGCTGTGCGGGAAA
AGAAAAATGTGTTAATCGAGGCTATTTCTGAAGATATTTGGGAAAATCCCACAGAAAGAATTACTTATCTCAAACAGATAGTG
CACACCATAAAATATGAAAGTGGAAGGCGATTTTTGGTAGACATCATTCACAGCATTTACCAAAGTTACTCACTAAAACACGA
AGATATTCTTAAACTGGCAACATTTTATGTCAAACACAATGCAATCACCCATTTTAAAGACCTCTGCAAATATCTTTGGCTGA
ACAGAGGAACAGAAAGTAAGAAACTGTTTTTAGAGTGTTTAGAAATTGCTGATGAGAAGGAGTTTCCTGATATTAAAAGTATT
GTGAGTGAATATATTAACTACTTGTTTACTGCAGGAGCTATTACCAAGGAAGAAATCATGCAAGCCTATGATGCTTTAGAGTA
G
Georgia 2007/1 MGF 505 6R
SEQ ID No. 260
ATGTTCTCCCTACAGGACCTCTGTCGGAAGAACATTTTCTTCCTTCCAAATGATTTTAGCAAGCATACCCTACAATGGCTGGG
ATTATATTGGAAAGAGCATGGATCCGTCCATCGAGCAGAAAAAGACAGCATAATGATACAGAATGAATTGGTTCTTTCTATCA
ATGATGCTTTACAGCTTGCAGGAGAGGAGGGGGACACAGATGTAGTACAGCTCTTGTTATTATGGGAGGGAAATCTGCATTAT
GCCATCATAGGAGCCTTGAAGACTGAAAAATATAACCTAATATGTGAGTATCATAGCCAAATTCAGGACTGGCATATTCTCCT
ACCCATGATTCAAGATCCAGAAACATTCGAAAAATGTCATGATTTAAGCCTTGGATGTGACTTTATTTGCCTTCTCCAACATG
CTGTAAAATACAACATGCTTTCTATTCTTGTCAAATATAAGGAGGATCTACTAAATGCAAGGATTAGGCATCGTATCCAATCC
CTGTTTGTTTTGGCATGCGAAAATCGGAGAATTGAAATTATTGATTGGATAGGCCAAAATCTGCCAATTCCTGAACCTGATGC
CATTTTTAGCATTGCTGTTGCTACAAGAGATTTAGAACTGTTTTCCTTAGGGTACAAGATTATTTTTGATTACATGCAAAGAC
AGGGAATCATTCAATTAACCAATGGAGTTCGCATGGTTGTGCTAAATCGTCACATTAGCATGGCAATAGATAATGGTCTTTTA
CCTTTTGTTCTGGAAACTTTAAAACATGGTGGGAATATACATAGAGCCTTATCTTATGCAGTAACACACAATAGAAGAAAAAT
TCTGGATTATCTTATTCGCCAGAAAAATATAGCCCCTAATACAATTGAAAGACTTTTATATCTGGCCGTGAAAAATCAATCTT
CCAGGAAAACTTTGAACTTGTTGCTATCTTACATAAATTACAAGGTGAAAAATGTTAAAAAGCTGGTAGAGCATGTAGTAAAT
GAGAAATCCACTCTTGTGTTAAAAATTTTATTAGAAAAAAAGGAAAATCTAGTGGATGCTGTTTTAACAAGACTTGTAAAACA
TTCTACATATTTCCAGGTGAGAGAATTTATCCAGGAGTTTTCCATCAGCCCAGAAAAATTCATTAAAATAGCTGTGCGGGAAA
AGAAAAATGTGTTAATCGAGGCTATTTCTGAAGATATTTGGGAAAATCCCACAGAAAGAATTACTTATCTCAAACAGATAGTG
CACACCATAAAATATGAAAGTGGAAGGCGATTTTTGGTAGACATCATTCACAGCATTTACCAAAGTTACTCACTAAAACACGA
AGATATTCTTAAACTGGCAACATTTTATGTCAAACACAATGCAATCACCCATTTTAAAGACCTCTGCAAATATCTTTGGCTGA
ACAGAGGAACAGAAAGTAAGAAACTGTTTTTAGAGTGTTTAGAAATTGCTGATGAGAAGGAGTTTCCTGATATTAAAAGTATT
GTGAGTGAATATATTAACTACTTGTTTACTGCAGGAGCTATTACCAAGGAAGAAATCATGCAAGCCTATGATGCTTTAGAGTA
G
Mkuzi 1979 MGF 505 6R
SEQ ID No. 261
ATGTTCTCCCTACAGGACCTCTGTCGGAAGAACACTTTCTTCCTTCCAAATGATTTTAGCAATCATACCCTACAACGGCTGGG
GTTATATTGGAAAGAGCATGGATCCGTCCATCGAATAGAAAAGGACAGCATAATGATACAGAATGAATTGGTTCTTTCTATCA
ATGATGCTTTACATCTTGCAGGAGAGGAGGGGAACACAGATGTAGTACAGCTCTTGTTATTATGGGAGGGAAATCTGCATTAT
GCCATCATAGGAGCCTTGAAGACTGAGAAATATAACCTAATATGTGAGTACCATAGCCAAATTCAGAACTGGCATGTTCTCCT
CCCCTTGATTCAAGATCCAGAAACATTCGAAAAATGTCATGATTTAAGCCTTGGATGTGACTTTATTTGCCTTCTCCAACATG
CTGTAAAATGTGACATGCTTTCTATTCTTGTTAAATATAAGGAGGATCTACTAAATGCAAGGATTAGGCATCGTATCCAATCC
CTGTTTGTTTTGGCATGCGAAAATCGGAGATTTGAGATTATTGAATGGATAGGTCAAAATCTGCCAATTCCTGAACCTGAGGC
CATTTTTAGCATTGCTATTGTTACAAAAGATATAGAACTGTTTTCCTTAGCGTACAAGCTTATTTTTGATTACATGCAAAGAC
AAGGAACTTTTCAATTAACCAATATGGTCCGCATGCTTCTGCTAAATCGGTACATTGGTATGGCAATAGAAAAAGGACTTTTA
CCCTTTATTCTGGAAACTTTAAAATATGGTGGTAGTGTAAATAGAGCTTTATCTTATGCAGTAATAGATAATAAAAGAAAAAT
TATAGACTATCTTGTACGCCATGAAAATATACCCCGTGGAACTATTGAAAGACTTTTGCATCTAGCTGTGAAAAAACAATCTT
CCAGAAAAACTTTGAACTTGTTGCTATCTTACATAAATTACAAGGTGAAAAATGTTAAAAAGCTGGTAGAGCATGTAGTAGAT
CACAACTCTACTCTTGTGTTAAAAATTTTATTGGAAAAAAAGGAAAATCTAGTGGATGCTGTTTTAACAAGACTTGTAAAACA
TTCTACATATTTCCGGGTAAGAGAATTTATCCAGGAGTTTTCCATCAGCCCAGAAAAATTCATTAAAATAGCTGTGCGGGAAA
AGAAAAATGTGTTAATCGAGGCTATTTCTGAAGATATTTGGGAAAATCCCACAGAAAGAATTACTTATCTCAAACAGATAGTG
CACACCATAAAATATGAAAGTGGAAGGCGGTTTTTGATAGACATCATTCACAGCATTTACCAAAGTTATTCACTAAAACATGA
AGATATTTTTAAACTGGCAACATTTTATGTCAAACACAATGCAATCACCCATTTTAAAGATCTCTGCAAATATCTTTGGCTGA
ACAGAGGAACAGAAAGTAAGAAACTGTTTTTAGAGTGCTTGGAAATTGCTGATGAGAAGGAGTTTCCTGATATTAAAAGCATT
GTGAGTGAATATATTAACTACTTGTTTACTGCAGGAGCTATTACCAAGGAAGAAATCATGCAAGCCTATAATGCTTTAGAGTA
G
Pretorisuskop/96/4 MGF 505 6R
SEQ ID No. 262
ATGTTCTCCCTTCAGGACCTCTGTCGGAAGAACATTTTCTTCCTTCCAAACGATTTTAGCAAGCATACCCTACAATGGCTGGG
GTTATATTGGAAAGAGCATGGATCCGTCCATCGAGCAGAAAAAGACAGCATAATGATACAGAATGAATTGGTTCTTTCTATCA
ATGATGCTTTACTGCTTGCAGGAGAGGAGGGGGACACAGATGTAGTACAGCTCTTGTTGCTATGGGAAGGAAATCTGCATTAT
GCCATCATAGGAGCCTTGAAGACTGAGAAATATAGCCTAGTATGTGAGTACCATAGCCAAATTCAGGACTGGCATGTTCTCCT
CCCCTTGATTCAAGATCCAGAAACATTCGAAAAATGTCATGATTTAAGCCTTGAATGTGACTTTATATGCCTTCTACAACATG
CTGTAAAATGTGACATGCTTTCTATTCTTGTTAAATATAAAGAGGATCTACTAAATGTAAGGATTAGGCATCGTATCCAATCC
CTGTTTGTTTTGGCATGCGAAAATCGGAGATTTGAGATTATTGAATGGATAGGTCAAAATCTGCCAATTCCTGAACCTGAGGC
CATTTTTAGCATTGCTATTGTTACAAAAGATATAGAACTGTTTTCCTTAGGATACAAGCTTATTTTTGATTACATGCAAAGAC
AAGGAACTTTTCAATTAACCAATATGGTTCGCATGCTTCTGCTAAATCGTTACATTGGTATGGCAATAGAAAAAGGCCTTTTA
CCCTTTATCGTGGAAACTTTAAAATATGGTGGTAGTGTAAATAGAGCTTTATCTTATGCAGTCATAGATAATAAAAGAAAAAT
TATAGACTATCTTGTACGTCATGAAAATATACCCCGTGGAACTATTGAAAGACTTTTGCATCTAGCTGTGAAAAAACAATCTT
CCAGAAAAACTTTGAACTTGTTGCTATCTTACATAAACTACAAGGTGAAAAATGTTAAAAAGCTGGTAGAGCATGTAGTAGAT
CACAACTCTACCCTTGTGTTAAAAATTTTATTGGAAAAAAAGGAAAATTTAGTGGATGCTGTTTTAACAAGACTTGTAAAACA
TTCTACATATTTCCGGGTGAGAGAATTTATCCAGGAGTTTTCCATCAGCCCAGAAAAATTCATTAAAATAGCTGTGCGGGAAC
AGAAAAATGTGTTAATCGAGGCTATTTCTGAAGATATTTGGGAAAATCCCACAGAAAGAATTACTTATCTCAAACAGATAGTG
CACACCATAAAATATGAAAGTGGAAGGCGGTTTTTGATAGACATCATTCACAGCATTTACCAAAGTTACTCACTAAAACACGA
AGATATTCTTAAACTGGCAATATTTTATGTCAAATACAATGCAATCACCCATTTTAAAGATCTCTGCAAATATCTTTGGCTGA
ACAGAGGAACAGAAAGTAAGAAACTGTTTTTAGAGTGCTTGGAAATTGCTGATGAGAAGGAGTTTCCTGATATTAAAAGCATT
GTGAGTGAATATATTAACTACTTGTTTACTGCAGGAGCTATTACTAAGGAAGAAATCATATAA
Tengani 62 MGF 505 6R
SEQ ID No. 263
ATGTTCTCCCTTCAGGACCTCTGTCGGAAGAACACTTTCTTCCTTCCAAATGATTTTAGCAAGCATACCCTACAACGGCTGGG
GTTATATTGGAAAGAGCATGGATCCGTCCATCGAGCAGAAAAAGACAGCATAATGATACAGAATGAATTGGTTCTTTCTATCA
ATGATGCTTTACAGCTTGCAGGAGAGGAGGGGGACACAGATGTAGTACAGCTCTTATTATTATGGGAAGGAAATCTTCATTAT
GCCATCATAGGAGCCTTGAAGACTGAGAAATATAACCTAATATATGAGTACCATAGCCAAATTCAGGACTGGCATGTTCTCTT
ACCCATGATTCAAGATCCAGAAACATTCGAAAAATGTCATGATTTAAGCCTTGCATGTGACTTTATATGCCTTCTCCAACATG
CTATAAAATATAACATGCTTTCTATCCTTGTCAAATATAAGGAAGACTTACTAAATGTAAGGATTAGGTATCGTATCCAATCC
CTGTTTGTTTTGGCATGTGAAAACCGGAGAATTGAGATTATTGAATGGATAGGTCAAAATCTGCCAATTCCTGAACCTGATGC
CATTTTTAGCATTGCTGTTGCTACAAGAGATTTAGAACTGTTTTCCTTAGGGTACAAGATTATTTTTGATTACATGCAAAGAC
AGGGAATCTTTCAATTAACCAATGGAGTTCGCATGGTTGTGCTAAATCGTCACATTAGCATGGCAATAGATAATGGTCTTTTA
CCCTTTGTTCTGGAAACTTTAAAACATGGTGGGAATATACATAGAGCCTTATCTTATGCAGTAACACACAATAAAAGAAAAAT
TCTGGATTATCTTATTCGCCAGAAAAATATAGCCCCTAATACAATTGAAAGACTTTTATATCTGGCCGTGAAAAATCAATCAT
CCAGAAAAACTTTGAACTTGTTACTATCTTACATAAATTACAAGGTGAAAAATGTTAAAAAGCTGGTAGAGCATGTAGTAAAT
GAGAAATCCACTCTTGTGTTAAAAATTTTATTAGAAAAAAAGGAAAATCTAGTGGATGCTGTTTTAACAAGACTTGTAAAACA
TTCTACATATTTCCAGGTGAGAGAATTTATCCAGGAGTTTTCCATCAGCCCAGAAAAATTCATTAAAATAGCTGTGCGGGAAA
AGAAAAATGTGTTGATCGAGGCTATTTCTGAAGATATTTGGGAAAATCCCACAGAAAGAATTACTTATCTCAAACAGATAGTG
CACACCATAAAATATGAAAGTGGAAGGCGATTTTTGGTAGACATCATTCACAGCATTTACCAAAGTTACTCACTAAAACACGA
AGATATTCTTAAACTGGCAACATTTTATGTCAAACACAATGCAACCACCCATTTTAAAGATCTCTGCAAATATCTTTGGCTGA
ACAGAGGAACAGAAAGTAAAAAACTCTTTTTAGAGTGTTTAGAAATTGCTGATGAGAAGGAGTTTCCTGATATTAAAAGCATT
GTGAGTGAATATATTAACTACTTGTTTACTGCAGGAGCTATTACCAAGGAAGAAGCCTATGGATGCTTTAGAGTAGCCATGTA
TTAA
Warmbaths MGF 505 6R
SEQ ID No. 264
ATGTTCTCCCTACAGGACCTCTGTCGGAAGAACATTTTCTTCCTTCCAAACGATTTTAGCAAGCATACCCTACAATGGCTGGG
GTTATATTGGAAAGAGCATGGATCCGTCCATCGAGCAGAAAAAGACAGCATAATGATACAGAATGAATTGGTTCTTTCTATCA
ATGATGCTTTACTGCTTGCAGGAGAGGAGGGGGACATAGATGTAGTACAGCTCTTGTTATTATGGGAGGGTAATCTGCATTAT
GCCATCATAGGAGCCTTGAAGACTGAGAAATATAACCTAATATGTGAGTACCATAGCCAAATTCAGGACTGGCATATTCTCCT
ACCCATGATTCAAGATCCAGAAACATTCGAAAAATGTCATGATTTAAGCCTTGCATGTGACTTTATATGCCTTCTCCAACATG
CTGTAAAATATAACATGCTTTCTATCCTTGTCAAATATAAGGAAGACTTACTAAATGTAAGGATTAGGTATCGTATCCAATCC
CTGTTTGTTTTGGCATGCGAAAACCGGAGAATTGAGATTATTCATTGGATAGGCCAAAATCTGCCAATTCCTGAACCTGATGC
CATTTTTAGCATTGCTGTTGCTACAAGAGATTTAGAACTGTTTTCCTTAGGGTACAAGATTATTTTTGATTACATGCAAAGAC
AGGGAATCTTTCAATTATCCAATGGAGTTCGCATGGTTGTGCTAAATCGTCACATTAGCATGGCAATAGATAATGGACTTTTA
CCCTTTGTTCTGGAAACTTTAAAACATGGTGGGAATATACATAGAGCCTTATCTTATGCAGTAACACACAATAGAAGAAAAAT
TCTGGATTATCTTATTCGCCAGAAAAATATAGCCCCTAATACAATTGAAAGACTTTTATATCTGGCCGTGAAAAATCAATCTT
CCAGGAAAACTTTGAACTTGTTGCTATCTTACATAAATTACAAGGTGAAAAATGTTAAAAAGCTGGTAGAGCATGTAGTAAAT
GAGAAATCCACTCTTGTGTTAAAAATTTTATTGGAAAAAAAGGAAAATCTAGTGGATGCTGTTTTAACAAGACTTGTAAAACA
TTCTACATATTTCCAGGTGAGAGAATTTATCCAGGAGTTTTCCATCAGCCCAGAAAAATTCATTAAAATAGCTGTGCGGGAAA
AGAAAAATGTGTTAATCGAGGCTATTTCTGAAGATATTTGGGAAAATCCCACAGAAAGAATTACTTATCTCAAACAGATAGTG
CACACCATAAAATATGAAAGTGGAAGACGATTTTTGATAGAGATCATTCACAGCATTTACCAAAGTTACTCACTAAAACACGA
AGATATTCTTAAACTGGCAACATTTTATGTCAAACACAATGCAACCACCCATTTTAAAGATCTCTGCAAATATCTTTGGCTGA
ACAGAGGAACAGAAAGTAAGAAACTGTTTTTAGAGTGTTTAGAAATTGCTGATGAGAAGGAGTTTCCTGATATTAAAAGTATT
GTGAGTGAATATATTAACTACTTGTTTACTGCAGGAACTATTACCAAGGAAGAAATCATGCAAGCCTATGATGCTTTAGAGTA
G
Warthog MGF 505 6R
SEQ ID No. 265
ATGTTCTCCCTTCAGGACCTCTGTCGGAAGAACATTTTCTTCCTTCCAAATGATTTTAGCAAGCATACCCTACAATGGCTGGG
GTTATATTGGAAAGAGCATGGATCCGTCCATCGAGCAGAAAAAAACAGCATAGTGATACAGAATGAATTGGTTCTTTCTATCA
ATGATGCTTTACAGCTTGCAGGGGAAGAGGGGGACACAGATGTAGTACAGCTCTTGTTATTATGGGAGGGAAATCTGCATTAT
GCCATCATAGGAGCCTTGAAGACTGAGAAATATAATCTAATATGTGAGTACCATAGCCAAATTCAGGACTGGCATGTTCTCCT
CCCCTTGATTCAAGATCCAGAAACATTCGAAAAATGTCATGATTTAAGCCTTGCATGTGACTTTATATGCCTTCTACAACATG
CTGTAAAATATAACATGCTTTCTATCCTTGTCAAATATAAGGAAGACTTACTAAATGTAAGGATTAGGTATCGTATCCAATCC
CTGTTTGTTTTGGCATGTGAAAACCGGAGAATTGAGATTATTGATTGGATAGGCCAAAATCTGCCAATTCCTGAACCTGATGC
CATTTTTAGCATTGCTGTTGCTACAAGAGATTTAGAACTGTTTTCCTTAGGGTACAAGATTATTTTTGATTACATGCAAAGAC
AGGGAATCTTTCAATTATCCAATGGAGTTCGCATGGTTGTGCTAAATCGTCACATTAGCATGGCAATAGATAATGGACTTTTA
CCCTTTGTTCTGGAAACTTTAAAACATGGTGGGAATATACATAGAGCCTTATCTTATGCAGTAACACACAATAGAAGAAAAAT
TCTGGATTATCTTATTCGCCAGAAAAATATAGCCCCTAATACAATTGAAAGACTTTTATATCTGGCCGTGAAAAATCAATCTT
CCAGGAAAACTTTGAACTTGTTGCTATCTTACATAAATTACAAGGTGAAAAATGTTAAAAAGCTAGTAGAGCATGTAGTAAAT
GAGAAATCCACTCTTGTGTTAAAAATTTTATTGGAAAAAAAGGAAAATCTAGTGGATGCTGTTTTAACAAGACTTGTAAAACA
TTCTACATATTTCCAGGTGAGAGAATTTATCCAGGAGTTTTCCATCAGCCCAGAAAAATTCATTAAAATAGCTGTGCGGGAAA
AGAAAAATGTGTTAATCGAGGCTATTTCTGAAGATATTTGGGAAAATCCCACAGAAAGAATTACTTATCTCAAACAGATAGTG
CACACCATAAAATATGAAAGTGGAAGACGATTTTTGATAGACATCATTCACAGCATTTACCAAAGTTACTCACTAAAACACGA
AGATATTCTTAAACTGGCAACATTTTATGTCAAATACAATGCAATCACCCATTTTAAAGATCTCTGCAAATATCTTTGGCTGA
ACAGAGGAACAGAAAGTAAGAAACTGTTTTTAGAGTGTTTAGAAATTGCTGATGAGAAGGAGTTTCCTGATATTAAAAGCATT
GTGAGTGAATATATTAACTACTTGTTTACTGCAGGAGCTATTACCAAGGAAGAAATCATGCAAGCCTATGATGCTTTAGAGTA
G

[0248] In an embodiment the attenuated ASFV of the invention comprises a functional version of MGF 505 6R. Suitably the functional version of MGF 505 6R comprises the sequence of SEQ ID No. 257, 258, 259, 260, 261, 262, 263, 264 or 265. Suitably the functional version of MGF 505 2R comprises a sequence having at least 70%, at least 80%, at least 90% or at least 95% identity with SEQ ID No. 257, 258, 259, 260, 261, 262, 263, 264 or 265. Suitably the functional version of MGF 505 6R consists of the sequence of SEQ ID No. 257, 258, 259, 260, 261, 262, 263, 264 or 265.

[0249] In an embodiment the invention provides an ASFV which comprises one or more, such as all, of the following sequences from the Benin 97/1 strain:
[0250] SEQ ID No. 55 (MGF 360 6L), SEQ ID No. 68 (MGF 360 10L), SEQ ID No. 78 (MGF 360 11L), SEQ ID No. 96 (MGF 360 12L), SEQ ID No. 108 (MGF 360 13L) and SEQ ID No. 120 (MGF 360 14L), and SEQ ID No. 141 (MGF 505 1R) and SEQ ID No. 151 (MGF 505 2R).

[0251] In an embodiment the invention provides an ASFV which comprises one or more, such as all, of the following sequences from the China/2018/AnhuiXCGQ strain:
[0252] SEQ ID No. 52 (MGF 360 6L), SEQ ID No. 63 (MGF 360 10L), SEQ ID No. 76 (MGF 360 11L), SEQ ID No. 89 (MGF 360 12L), SEQ ID No. 101 (MGF 360 13L), SEQ ID No. 113 (MGF 360 14L) and SEQ ID No. 125 (MGF 360 21R), and
[0253] SEQ ID No. 135 (MGF 505 1R) and SEQ ID No. 148 (MGF 505 2R).

[0254] In an embodiment the invention provides an ASFV which comprises one or more, such as all, of the following sequences from the Georgia 2007/1 strain:
[0255] SEQ ID No. 51 (MGF 360 6L), SEQ ID No. 62 (MGF 360 10L), SEQ ID No. 75 (MGF 360 11L), SEQ ID No. 88 (MGF 360 12L), SEQ ID No. 100 (MGF 360 13L), SEQ ID No. 112 (MGF 360 14L) and SEQ ID No. 124 (MGF 360 21R), and
[0256] SEQ ID No. 134 (MGF 505 1R) and SEQ ID No. 147 (MGF 505 2R).

[0257] In an embodiment the invention provides an ASFV which comprises one or more, such as all, of the following sequences from the Ken05/Tk1 strain: SEQ ID No. 35 (MGF 110 6L), SEQ ID No. 44 (MGF 110 8L), and
[0258] SEQ ID No. 58 (MGF 360 6L), SEQ ID No. 65 (MGF 360 10L), SEQ ID No. 86 (MGF 360 11L) and SEQ ID No. 130 (MGF 360 21R), and
[0259] SEQ ID No. 145 (MGF 505 1R) and SEQ ID No. 156 (MGF 505 2R).

[0260] In an embodiment the invention provides an ASFV which comprises one or more, such as all, of the following sequences from the Ken06.Bus strain:
[0261] SEQ ID No. 36 (MGF 110 6L), and
[0262] SEQ ID No. 61 (MGF 360 6L), SEQ ID No. 64 (MGF 360 10L), SEQ ID No. 87 (MGF 360 11L), SEQ ID No. 99 (MGF 360 12L), SEQ ID No. 111 (MGF 360 13L), SEQ ID No. 123 (MGF 360 14L) and SEQ ID No. 132 (MGF 360 21R), and
[0263] SEQ ID No. 144 (MGF 505 1R) and SEQ ID No. 158 (MGF 505 2R).

[0264] In an embodiment the invention provides an ASFV which comprises one or more, such as all, of the following sequences from the Kenya 1950 strain:
[0265] SEQ ID No. 37 (MGF 110 6L), SEQ ID No. 45 (MGF 110 8L), and
[0266] SEQ ID No. 60 (MGF 360 6L), SEQ ID No. 66 (MGF 360 10L), SEQ ID No. 85 (MGF 360 11L), SEQ ID No. 98 (MGF 360 12L), SEQ ID No. 110 (MGF 360 13L), SEQ ID No. 122 (MGF 360 14L) and SEQ ID No. 131 (MGF 360 21R), and
[0267] SEQ ID No. 143 (MGF 505 1R) and SEQ ID No. 157 (MGF 505 2R).

[0268] In an embodiment the invention provides an ASFV which comprises one or more, such as all, of the following sequences from the L60 strain:
[0269] SEQ ID No. 54 (MGF 360 6L), SEQ ID No. 67 (MGF 360 10L), SEQ ID No. 77 (MGF 360 11L), SEQ ID No. 95 (MGF 360 12L), SEQ ID No. 107 (MGF 360 13L) and SEQ ID No. 119 (MGF 360 14L), and
[0270] SEQ ID No. 140 (MGF 505 1R) and SEQ ID No. 150 (MGF 505 2R).

[0271] In an embodiment the invention provides an ASFV which comprises one or more, such as all, of the following sequences from the Malawi Lil-20/1 (1983) strain:
[0272] SEQ ID No. 38 (MGF 110 6L), SEQ ID No. 46 (MGF 110 8L), and
[0273] SEQ ID No. 59 (MGF 360 6L), SEQ ID No. 74 (MGF 360 10L), SEQ ID No. 84 (MGF 360 11L), SEQ ID No. 97 (MGF 360 12L), SEQ ID No. 109 (MGF 360 13L), SEQ ID No. 121 (MGF 360 14L) and SEQ ID No. 133 (MGF 360 21R), and
[0274] SEQ ID No. 146 (MGF 505 1R) and SEQ ID No. 155 (MGF 505 2R).

[0275] In an embodiment the invention provides an ASFV which comprises one or more, such as all, of the following sequences from the Mkuzi 1979 strain:
[0276] SEQ ID No. 39 (MGF 110 6L), SEQ ID No. 47 (MGF 110 8L), and
[0277] SEQ ID No. 57 (MGF 360 6L), SEQ ID No. 69 (MGF 360 10L), SEQ ID No. 79 (MGF 360 11L), SEQ ID No. 94 (MGF 360 12L), SEQ ID No. 106 (MGF 360 13L), SEQ ID No. 118 (MGF 360 14L) and SEQ ID No. 128 (MGF 360 21R), and
[0278] SEQ ID No. 138 (MGF 505 1R) and SEQ ID No. 149 (MGF 505 2R).

[0279] In an embodiment the invention provides an ASFV which comprises one or more, such as all, of the following sequences from the Pretorisuskop/96/4 strain:
[0280] SEQ ID No. 40 (MGF 110 6L), SEQ ID No. 48 (MGF 110 8L), and
[0281] SEQ ID No. 56 (MGF 360 6L), SEQ ID No. 70 (MGF 360 10L), SEQ ID No. 81 (MGF 360 11L), SEQ ID No. 93 (MGF 360 12L), SEQ ID No. 105 (MGF 360 13L), SEQ ID No. 117 (MGF 360 14L) and SEQ ID No. 127 (MGF 360 21R), and
[0282] SEQ ID No. 142 (MGF 505 1R) and SEQ ID No. 153 (MGF 505 2R).

[0283] In an embodiment the invention provides an ASFV which comprises one or more, such as all, of the following sequences from the Tengani 62 strain:
[0284] SEQ ID No. 41 (MGF 110 6L), and
[0285] SEQ ID No. 71 (MGF 360 10L), SEQ ID No. 82 (MGF 360 11L), SEQ ID No. 90 (MGF 360 12L), SEQ ID No. 102 (MGF 360 13L), SEQ ID No. 114 (MGF 360 14L) and SEQ ID No. 126 (MGF 360 21R), and
[0286] SEQ ID No. 136 (MGF 505 1R) and SEQ ID No. 152 (MGF 505 2R).

[0287] In an embodiment the invention provides an ASFV which comprises one or more, such as all, of the following sequences from the Warmbaths strain:
[0288] SEQ ID No. 42 (MGF 110 6L), SEQ ID No. 49 (MGF 110 8L), and
[0289] SEQ ID No. 53 (MGF 360 6L), SEQ ID No. 73 (MGF 360 10L), SEQ ID No. 80 (MGF 360 11L), SEQ ID No. 92 (MGF 360 12L), SEQ ID No. 104 (MGF 360 13L), SEQ ID No. 116 (MGF 360 14L) and SEQ ID No. 129 (MGF 360 21R), and
[0290] SEQ ID No. 137 (MGF 505 1R) and SEQ ID No. 154 (MGF 505 2R).

[0291] In an embodiment the invention provides an ASFV which comprises one or more, such as all, of the following sequences from the Warthog strain:
[0292] SEQ ID No. 43 (MGF 110 6L), SEQ ID No. 50 (MGF 110 8L), and
[0293] SEQ ID No. 72 (MGF 360 10L), SEQ ID No. 83 (MGF 360 11L), SEQ ID No. 91 (MGF 360 12L), SEQ ID No. 103 (MGF 360 13L), SEQ ID No. 115 (MGF 360 14L), and
[0294] SEQ ID No. 139 (MGF 505 1R).

[0295] The translation products (i.e. protein sequences) of these genes are given below:

### Benin 97/1 MGF Gene Protein Sequences

translation of Benin 97/1 MGF 110-11L (A9JKR9)
SEQ ID No. 1
MKYSWKNGGGDYWPIIIRHCCFYLVFSIAFVGYIVFAYYKNLHLNTAMKLLALLCILIWLSQPGLNRPLSIFYMKQNLPRTYT
PPIRELEYWCTYGKHCDFCWECRNGICKNKVWDDMSSVQEHSYPMEHCMIHRQCKYIRDGPIFQVECTMQTSDATHLINA
translation of Benin 97/1 MGF 110-12L (A9JKS1)
SEQ ID No. 2
MKVFLGLLLGYSTILILTYQSPTTQWCFYEISLKILNHHSMEKWRDKNWSIIIRYYCFYLVFSFAFAGCVAFAICKNLRLCTT
MKLLMLLNILVLLSQPILNN
translation of Benin 97/1 MGF 360-6L (A9JKS8)
SEQ ID No. 3
MNSLQVLTKKVLIENKAFSEYHEDDIFILQQLGLWWHNGPIGFCKQCKMVTSGSMSCSDVDSYELDRALVRAVKKNQTDLIKL
FVLWGANINYGIICAKTERTKDLCIELGANPEFLDVGLYNMFVDLIKQQKVLLAIDIYYDNISILDSFDSHDFYVLIDFIYNC
FILNLDEKEKMIKNTYVLKFWFKIAIEFNLIKPIRFLSKKFPHLDYWRLKTAVYLGNVDEIHHAYFQENIRLDPNDMMSLACM
YPQNKLGIYYCFALGANINTALETLIGFINHEVNREITFFSNYGIWSNVHFCISLGANPYTKKIQETLLRQEKNVIMKLLFKK
GLLSPHSILHKKILEPSEVRKIISTYEYTETFHSFSLLRDNLR
translation of Benin 97/1 MGF 360-10L
SEQ ID No. 4
MVPSLQSFAKKVLASQHVSIDYHVILERCGLWWYKAPISLDCKHMLIKLPNFADGLDLNTALMLATKENNYQLIKMFTDWGAD
INYGLICANTPPIREFCWELGAKYQVDKKKIMHIFFKLIHPNTTSNNIILCLKFENDNPFSAYVIIREIKSCIHWKLKNLAED
TNVLSNISDGDMLTIYCFIVALQDNLREAISYVYQHFKYLNTWWLTCALCYNKLFDLHNLYEKEKIRMDMDEMMRIACTKDNN
FLTIYYCFILGANINLAMIASIRFYNMDNLFFCIDLGADAFEEAKALAEQQNYYLISHRLSLDIYSPDSSLLTLKEADPNKIY
RLLKNYKSKSMLAYLNYDINDTSL
translation of Benin 97/1 MGF 360-11L (A9JKU4)
SEQ ID No. 5
MLPSLQSLTKKVLAGQCVSVDHYHILKCCGLWWHNGPIMLHIRRNKLFIRSTCFSQGIELNIGLMKAVKENNHDLIKLFTEWG
ADINYGMICALTENTRDLCKELGAKEYLEREYILKIFFDTTRDKTSSNIIFCHEVFSNNPNLRIIDNLDLRGEIMWELRGLME
ITFMLDHDDSFSTVLTKYWYAIAVDYDLKDAIRYFYQKYPRLHRWRLMCALFYNNVEDLHELYEIERVRMDIDEMMHIACIQD
YSYSAIYYCFIMGANINQAMLVSIQNYNLGNLFFCIDLGANAFEEGKALAEQKENYLIAHALSLKHYNPVISLLSNVMDPEKI
NYMLKNYHSINMGIFLDYEQR
translation of Benin 97/1 MGF 360-12L (A9JKU9)
SEQ ID No. 6
MLPSLQSLTKKVLAGQCVPTNQHYLLKYYDLWWYNAPITFDHNLRLIKSSGIKEGLDLNTALVKAVRENNYSLIKLFTEWGAD
INYGLVSVNTEHTRDLCQELGAKEILNEEEILQIFIDLKFHKTSSNIILCHEVFSNNPILQKVNNLKLRIEIFWELRELIEKT
DLLNNEFLLSTLLLKYWYAIAVRYSLKEAIQYFYQKYTHMNTWRLTCALCENNVFDLHEAYEKDKIHMDIEEMMRIACIKDHN
LSTMYYCYMLGANINQAMLTSIQYYNIENMFFCMDLGADVFEEGTTALGEGYELIKNILSLKIYSPTTIPLPKSTDPEIIDHA
LKNYFSKNMMIFLSYDLR
translation of Benin 97/1 MGF 360-13L (A9JKU7)
SEQ ID No. 7
MSLPLSLQTLVKKTVASQCLSIDEHCILKYCGLWWHDAPLKLCMDRGRIQIKSGFLGEDIDLRVALIIAVKENNYSLIKLFTE
WGANINYSLLSINTKHIRELCRQLGAKETLEDNDIFRIFTRIMHNKTSGSIILCHEIFMNNPMLENKFVIQLRGLIYKRLWGL
IEIKETDELNDLLVKYWYAKAVQYVCKNAICFLDEKYTDLNEWRLKCLLYYNKIYELHEMYHKKKVQIDVHDMICLACAKDNN
LLTIYYCYALGGNINQAMLTSVQYYNVGNIFFCIDLGGNAFEEGRAIAEQKGYNFLSHSLTLDIYSSDASLPLNLKDPEKISS
LLKDYKSKNLSIIWEYSHNIL
translation of Benin 97/1 MGF 360-14L (A9JKV1)
SEQ ID No.
MLSLQTLAKKVVACNYLSSDYDYTLQRFGLWWDLGPIHLCNNCKQVFSYKHLQCFSEDDLCLEAALVKAVKSDNLELIRLFVD
WGANPEYGLIRVPAVYLKRLCAELGGLTPVSEPRLLEILKEVANLKSCAGVLLGYDMFCHNPLLETVTRTTLDTVTYTCSNIP
LTGDTAHLLLTKFWFALALRHNFTKAIHYFYKRHKNQLYWRVACSLYENNIFDIHELCREKEICISPNLMMKFACLREKNYAA
IYYCHRLGASLDYGMNLSIYNNNTLNMFFCIDLGAADFDRAQLIAHKAYMYNLSNIFLVKQLFSRDVTLVLDVTEPQEIYDML
KTYTSKNMKRAEEYLTAHPEIIVID
translation of Benin 97/1 MGF 505-1R (A9JKU5)
SEQ ID No. 9
MFSLQNLCRKTLPDCKLPEFFDDYILQLLGLYWENHGTIQRAGNNCVLIQQHTLIPVNEALRIAASEENYEIVGLLLAWEGNL
YYAIIGALEGNRYNLIRKYDDQIKDHHDILPFIDDPIIFHKCHIMRRCFFDCILYQAVKYSKFRVLLYFKYTLEDDLPLVHLL
IEKACEDHNYEVIKWIYENLHVCHIIDTFDCAIAHKDLRLYCLGYTFIYNRIVPYKYHHLDILILSSLQLLHKVAAKGYLDFI
LETLKYDHNIDNLDVILTQAATYNHRKILTYFIPQSTYAQIEQCLFVAIKTKSSKKTLNLLLSHLNLSIKLIQKISQYVATEN
STNIIGILSMKRKKKIYLDIILTKFVKNAIFNKFVVRCMERFSINPERIVKMAARINKMMLVKKISEHVWKNHAARLKHLKHA
VHTMKHKDGKNRLMNFIYEHCYYHMQGEEIFSLARFYAIHHAPKLFDVFYNCCILDTIRFKSLLLDCSHIIGKNAHDATNINI
VNKYIGNLFAMGVLSKKEILQDYPSIYSKHYMP
translation of Benin 97/1 MGF 505-2R (A9JKV3)
SEQ ID No. 10
MFSLQDLCRKHLFILPDVFGEHVLQRLGLYWRCHGSLQRIGDDHILIRRDLILSTNEALRMAGEEGNNEVVKLLLLWKGNLHY
AVIGALQGDQYDLIHKYENQIGDFHFILPLIQDANTFEKCHALERFCGVSCLLKHATKYNMLPILQKYQEELSMRAYLHETLF
ELACLWQRYDVLKWIEQTMHVYDLKIMFNIAISKRDLTMYSLGYIFLFDRGNTEATLLTQHLEKTAAKGLLHFVLETLKYGGN
IDTVLTQAVKYNHRKLLDYFLRQLPRKHIEKLLLLAVQEKASKKTLNLLLSHLNYSVKRIKKLLRYVIEYESTLVIKILLKKR
VNLIDAMLEKMVRYFSATKVRTIMDELSISPERVIKMAIQKMRTDIVIHTSYVWEDDLERLTRLKNMVYTIKYEHGKKMLIKV
MHGIYKNLLYGEREKVMFHLAKLYVAQNAATQFRDICKDCYKLDVARFKPRFKQLILDCLEIVTKKSCYSILEILEKHIISLF
TMKVMTEEEKNLCLEILYKVIHYKTIQC

### MGF 110 5L Protein Sequences

Ken05/Tk1 MGF 110 5L protein
SEQ ID No. 306
MLVIFLGLLGLLANQVLGLPNQPAGQLHPTDNPPKEELGYWCTYTESCKFCWNCQNGLCEGKLENTTILENEYVQSCIVSRWL
NKCMYDLGQGIDHVMACSEPKPWNPYKILKREWKKNVSQN
Ken06.Bus MGF 110 5L protein
SEQ ID No. 307
MLVIFLGLLGLLANQVLGLPNQPAGQLHPTDNPPKEELGYWCTYTESCKFCWNCQNGLCEGKLENTTILENEYVQSCIVSRWL
NKCMYDLGQGIHHVMPCSEPKPWNPYKILKKEWKENVSQN
Malawi Lil-20/1/1983 MGF 110 5L protein
SEQ ID No. 308
MLVIFLGILGLLANQVSSQLVGQLHPTENPSENELEYWCTYMECCQFCWDCQDGLCVNKLGNTTILENEYVHPCIVSRWLNKC
MYDLGQGIDHVMVCSQPKYWNPYKILKKEWKENNSQN
Mkuzi 1979 MGF 110 5L protein
SEQ ID No. 309
MLVIFLGILGLLANQVSSQLVGQLHPTENPSENELEYWCTYMECCQFCWDCQDGLCVNKLGNTTILENEYVHPCIVSRWLNKC
MYDLGQGIDHVMVCSQPKYWNPYKILKKEWKENNSQN
Pretorisuskop/96/4 MGF 110 5L protein
SEQ ID No. 310
MLVIFLGILGLLANQVSSQLVGQLHPTENPSENELEYWCTYMECCQFCWDCQNGLCVNKLGNTTILENEYVHPCIVSRWLNKC
MYDLGQGIDHVMVCSQPKYWNPYKILKKEWKENNSQNK
Tengani62 MGF 110 5L protein
SEQ ID No. 311
MLVIFLGILGLLVNQVSSQPVGQLHPTENPSENELEYWCTYMECCQFCWDCQNGLCVNKLGNTTILENEYVHPCIVSRWLNKC
MYDLGQGIDHVMVCSQPKYWNPYKILKKEWKENNS
Warmbaths MGF 110 5L protein
SEQ ID No. 312
MLVIFLGILGLLANQVSSQLVGQLHPTENPSENELEYWCTYMECCQFCWDCQNGLCVNKLGNTTILENEYVHPCIVSRWLNKC
MYDLGQGIDHVMVCSQPKYWNPYKILKKEWKENNSQNK
Warthog MGF 110 5L protein
SEQ ID No. 313
MLVIFLGILGLLANQVSSQLVGQLHPTENPSENELEYWCTYMECCQFCWDCQNGLCVNKLGNTTILENEYVHPCIVSRWLNKC
MYDLGQGIDHVMVCSQPKYWNPYKILKKEWKENNSQNK
China/2018/AnhuiXCGQ MGF 110 5L/6L fusion protein
SEQ ID No. 314
MLVIFLGILGLLASQVSSQLVGQLRPTEEPPEEELEYWCAYMESCQFCWDCQDGTCINKIDGSVIYKNEYVKSCLVSRWLDKC
MYDLDKGIYHTMNCNQVLGLPNQPAGQLHPTDNPPQEELEYWCTYTENCKFCWNCQNGLCEGKLENTTILENEYVQSCIVSRW
LNKCMYDLGQGIHHVMACSEPKPWNPYKILKREWKENNS
Georgia 2007/1 MGF110 5L/6L fusion protein
SEQ ID No. 315
MLVIFLGILGLLASQVSSQLVGQLRPTEEPPEEELEYWCAYMESCQFCWDCQDGTCINKIDGSVIYKNEYVKSCLVSRWLDKC
MYDLDKGIYHTMNCNQVLGLPNQPAGQLHPTDNPPQEELEYWCTYTENCKFCWNCQNGLCEGKLENTTILENEYVQSCIVSRW
LNKCMYDLGQGIHHVMACSEPKPWNPYKILKREWKENNS

### MGF 110 12L Protein Sequences

Benin 97/1 MGF 110 12L protein
SEQ ID No. 316
MKVFLGLLLGYSTILILTYQSPTTQWCFYEISLKILNHHSMEKWRDKNWSIIIRYYCFYLVESFAFAGCVAFAICKNLRLCTT
MKLLMLLNILVLLSQPILNN
China/2018/AnhuiXCGQ MGF 110 12L protein
SEQ ID No. 317
MKVFLGLLLGYSTILILTYQSPTTPWCFYEISLKIPNHHSMKCCSYPRLYEHEMFMEKWRDKNWPIIIRYYCFYLVFSFVFAG
CVAFAICKNLRLSTTMKLLMLLSILVLLLSQPILNN
Georgia 2007/1 MGF 110 12L protein
SEQ ID No. 31
MKVFLGLLLGYSTILILTYQSPTTPWCFYEISLKIPNHHSMKCCSYPRLYEHEMFMEKWRDKNWPIIIRYYCFYLVFSFVFAG
CVAFAICKNLRLSTTMKLLMLLSILVLLLSQPILNN
Ken05/Tk1 MGF 110 12L protein
SEQ ID No. 319
MKVFLGLLLGFSIILILTYQSPTTQHPPKEELAYWCTYAKSCDFCWDCQNDTCINKVINESISITSIVNCRVTRDSQSCFYEI
SVKIPNHHSMECSYPRLYEHEMFMEKWRDEYWPIIIKQCCFYLVFSIAFAGCVAFAICKNLRLRTTIKLLILLSILVWLSQPV
LN
Ken06.Bus MGF 110 12L protein
SEQ ID No. 320
MKVFLALLLGYLTILILTYQTPTTQHPPKEELPYWCTYVKNCDLCWDCQDSIYWNKVISESISINSIINCRVTCDSQSQSCFY
EILLKIPNHHSMECSYPGSYENEMFMEKWRDENWSIIIKHYCFYLVFSFAFAGCVAFAICKNLRLSTTMKLLMLLSILVCLSQ
PILNN
Kenya 1950 MGF 110 12L protein
SEQ ID No. 321
MKVFLGLLLGFSIILILTYQSPTTQHPPKEELAYWCTYAKSCDFCWDCQNDTCINKVINESISITSIVNCRVTRDSQSCFYDI
SVKIPNHHSMECSYPRLYEHEMFMEKWRDEYWPIIIKQCCFYLVFSFAFAGCVAFAICKNLRLRTTIKLLILLSILVWLSQPI
LNN
L60 MGF 110 12L protein
SEQ ID No. 322
MKVFLGLLLGYSTILILTYQSPTTQWCFYEISLKILNHHSMEKWRDKNWSIIIRYYCFYLVFSFAFAGCVAFAICKNLRLCTT
MKLLMLLNILVLLSQPILNN
Malawi Lil-20/1/1983 MGF 110 12L protein
SEQ ID No. 323
MKVFLGLLLGYSTILILTYQSPTTQHPPKEELEYWCTYAKTCDFCWDCQNDTCINKVINESISMNSIVNCRVTRDSQSQSCFY
EISLKIPNYHSMECSYPRLYKHFMSMEKWRDENWPILIRHYCFYLVFSFAFAGCVAFAICKNLRLRTTMKLLMLLSILVLLSQ
PILNN
Mkuzi 1979 MGF 110 12L protein
SEQ ID No. 324
MNATMKVFLGLLLGYSTILILTYQSPTTQWCFYEISLKILNHHSMEKWRDKNWSIIIRYYCFYLVFSFAFAGCVAFAICKNLR
LCTTMKLLMLLGILVLLSQPILNN
Warmbaths MGF 110 12L protein
SEQ ID No. 325
MKVFLGLLLGYSTILILTYQSPATQWCFYEISLKIPNHHSMECSYPRLYKHFIFMEKWRDKNWSIIIRYYCFYLVFSFAFAGC
IAFAICKNLRLCTTMKLLMLLSILVLLSQPILNN
Warthog MGF 110 12L protein
SEQ ID No. 326
MKVFLGLLLGYSTILILTYQSPATQWCFYEISLKIPNHHSMECSYPRLYKHFMFMKKWRDKNWSIIIRYYCFYLVFSFAFAGC
IAFAICKNLRLCTTMKLLMLLSILVLLSQPILNN

### MGF 360 12L Protein Sequences

Georgia 2007/1 MGF 360 12L protein
SEQ ID No. 159
MLPSLQSLTKKVLAGQCVPTNQHYLLKCYDLWWHDAPITFDHNLRLIKSAGIKEGLNLNTALVKAVRENNYNLIKLFAEWGAD
INYGLVSVNTEHTWDLCRELGAKETLNEEEILQIFIDLKFHKTSSNIILCHEVFSNNPILQKVNNIKMRIEIFWELRELIVKT
DLLNNEFSLSTLLLKYWYAIAIRYNLKEAIQYFYQKYTHLNTWRLTCALCENNVFDLHEAYEKDKIHMDIEEMMRIACIKDHN
LSTMYYCYVLGANINQAMLSSIQYYNIENMFFCIDLGADVFEEGTTALGEGYELIKNILSLKIYSPATTPLPKSTDPEIIDHA
LKNYVSKNMMIFLTYDLR*
China/2018/AnhuiXCGQ MGF 360 12L protein
SEQ ID No. 160
MLPSLQSLTKKVLAGQCVPTNQHYLLKCYDLWWHDAPITFDHNLRLIKSAGIKEGLNLNTALVKAVRENNYNLIKLFAEWGAD
INYGLVSVNTEHTWDLCRELGAKETLNEEEILQIFIDLKFHKTSSNIILCHEVFSNNPILQKVNNIKMRIEIFWELRELIVKT
DLLNNEFSLSTLLLKYWYAIAIRYNLKEAIQYFYQKYTHLNTWRLTCALCENNVFDLHEAYEKDKIHMDIEEMMRIACIKDHN
LSTMYYCYVLGANINQAMLSSIQYYNIENMFFCIDLGADVFEEGTTALGEGYELIKNILSLKIYSPATTPLPKSTDPEIIDHA
LKNYVSKNMMIFLTYDLR*
Tengani 62 MGF 360 12L protein
SEQ ID No. 161
MLPSLQSLTKKVLAGQCVPTNQHYLLKCYDLWWHDAPITFDHNLRLIKSAGIKEGLNLNTALVKAVRENNYNLIKLFAEWGAD
INYGLVSVNTEHTWDLCRELGAKETLNEEEILQIFIDLKFHKTSSNIILCHEVFSNNPILQKVNNIKMRIEIFWELRELIEKT
DLLNNEFSLSTLLLKYWYAIAIRYNLKEAIQYFYQKYTHLNTWRLTCALCFNNVFDLHEAYEKDKIHMDIEEMMRIACIKDHN
LSTMYYCYVLGANINQAMLSSIQYYNIENMFFCIDLGADVFEEGTTALGEGYELIKNILSLKIYSPATTPLPKSMDPEIIDHA
LKNYVSKNMMIFLTYDLR*
Warthog MGF 360 12L protein
SEQ ID No. 162
MLPSLQSLTKKVLAGQCVPTNQHYLLKCYDLWWHDGPITFDHNLKLIKSAGIKEGLDLNTALVKAVRENNYNLIKLFAEWGAN
INYGLVSVNTEHTRDLCRELGAKETLNEEEILQIFIDLKFHKTSSNIILCHEVFSNNPILQKVNNIKMRIEIFWELRELIEKT
DLLNNEFSLSALLLKYWYAIAIRYNLKEAIQYFYQKYTHLNTWRLTCALCENNVFDLHEAYEKDKIHMDIEEMMRIACIKDHN
LSTMYYCYVLGANINQAMLTSIQYYNIENMFFCMDLGADAFEEGTIALGEGYKLIKNILSLKIYSPATTPLPKSTDPEIIDHA
LKNYVSKNMMIFLTYDLR*
Warmbaths MGF 360 12L protein
SEQ ID No. 163
MLPSLQSLTKKVLAGQCVPTNQHYLLKCYDLWWHDGPITFDHNLKLIKSAGIKEGLDLNTALVKAVRENNYNLIKLFAEWGAD
INYGLVSVNTEHTRDLCRELGAKETLNEEEILQIFIDLKFHKTSSNIILCHEVFSNNPILQKVNNIKMRIEIFWELRELIEKT
DLLNNEFSLSTLLLKYWYAIAIRYNLKEAIQYFYQKYTHLNTWRLTCALCENNVFDLHEAYEKDKIYMDIEEMMRIACIKDHN
LSTMYYCYVLGANINQAMLTSIQYYNVENMFFCMDLGADAFEEGTIALGEGYKLIKNILSLKIYSPATTPLPKSTDPEIIDHA
VKNYVSKNMMIFLTYDLR*
Pretorisuskop/96/4 MGF 360 12L protein
SEQ ID No. 164
MLPSLQSLTKKVLAGQCVPTNQHYLLKCYDLWWHDGPITFDHNLKLIKSAGIKEGLDLNTALVKAVRENNYNLIKLFAEWGAN
INYGLVSVNTEHTWDLCRELGAKETLNEEEILQIFIDLKFHKTSSNIILCHEVFSNNPILQKVNNIKMRIEIFWELRELIEKT
DLLNNEFSLSTLLLKYWYAIAIRYNLKEAIQYFYQKYTHLNTWRLTCALCFNNVFDLHEAYEKDKIHMDIEEMMRIACIKDHN
LSTMYYCYVLGGNINQAMLTSIQYYNIENMFFCMDLGADAFEEGTIALGEGYKLIKNILSLKIYSPATTPLPKSTDPEIIDHA
LKNYVSKNMMIFLTYDLR*
Mkuzi 1979 MGF 360 12L protein
SEQ ID No. 165
MLPSLQSLTKKVLAGQCVPTNQHYLLKYYDLWWHDAPITFDHNLRLIKSAGIKEGLDLNTALVKAVKENNYNLIKLFAEWGAD
INYGLVSVSSEHTWDLCRELGAKETLNEKEILQIFIDLKFHKTSSNIILCHEVFSNNPILQKVNNIKMRIEIFWELRELIEKT
DLLNNEFSLSTLLLKYWYAIAIRYNLKEAIQYFYQKYTHLNTWRLTCALCFNNVFDLHEAYEKDKIYMDIEEMMRIACIKDHN
LSTMYYCYMLGANINQAMLTSIQYYNIENMFFCMDLGADVFEEGTTALGEGYELIKNILSLKIYSPTTIPLPKSTDPEIIDHA
LKNYFSKNMMIFLSYDLR*
L60 MGF 360 12L protein
SEQ ID No. 166
MLPSLQSLTKKVLAGQCVPTNQHYLLKYYDLWWYNAPITFDHNLRLIKSSGIKEGLDLNTALVKAVRENNYSLIKLFTEWGAD
INYGLVSVNTEHTRDLCQELGAKEILNEEEILQIFIDLKFHKTSSNIILCHEVFSNNPILQKVNNLKLRIEIFWELRELIEKT
DLLNNEFLLSTLLLKYWYAIAVRYSLKEAIQYFYQKYTHLNTWRLTCALCFNNVFDLHEAYEKDKIHMDIEEMMRIACIKDHN
LSTMYYCYMLGANINQAMLTSIQYYNIENMFFCMDLGADVFEEGTTALGEGYELIKNILSLKIYSPTTIPLPKSTDPEIIDHA
LKNYFSKNMMIFLSYDLR*
Benin 97/1 MGF 360 12L protein
SEQ ID No. 6
MLPSLQSLTKKVLAGQCVPTNQHYLLKYYDLWWYNAPITFDHNLRLIKSSGIKEGLDLNTALVKAVRENNYSLIKLFTEWGAD
INYGLVSVNTEHTRDLCQELGAKEILNEEEILQIFIDLKFHKTSSNIILCHEVFSNNPILQKVNNLKLRIEIFWELRELIEKT
DLLNNEFLLSTLLLKYWYAIAVRYSLKEAIQYFYQKYTHMNTWRLTCALCENNVFDLHEAYEKDKIHMDIEEMMRIACIKDHN
LSTMYYCYMLGANINQAMLTSIQYYNIENMFFCMDLGADVFEEGTTALGEGYELIKNILSLKIYSPTTIPLPKSTDPEIIDHA
LKNYFSKNMMIFLSYDLR*
Malawi Lil-20/1 MGF 360 12L protein
SEQ ID No. 167
MLPSLQSLTKKVLAGQCLPTDQYYLLKCYDLWWYDSPITFDHNLGLIKSAGIKDGLDLNTALVKAVRENNYNLIKLFTEWGAD
INYGLVSVNTEHTRDLCRELGAKETLNEEEILRIFIDLKFYKTSSNIILCHEVFSNNPLLQKVNNLKMRIEIFWELRELIKKT
DLLNNEFSLNTLLLKYWYAIAVRYNLKEAIQYFYQKYTHLNTWRLTCALCENNVFDLHEAYEKDKIYMDLEEMMRVACIKDHN
LSTIYYCYVLGANINQAMLASIQYYNIENMFFCMDLGADVFEENMPVGEGYELIRNILSLKIYSPSTAPLPKNTDPEIIDHVL
KNYKSKNMMTFLSYDLR*
Kenya 1950 MGF 360 12L protein
SEQ ID No. 168
MLPSLQSLTKKVLAGQCLPEDQHYLLKCYDLWWNNAPITFDHNLRLIKSAGLQEGLDLNMALVKAVKENNYSLIKLFTEWGAN
INYGLISVNTEHTWDLCRELGAKKTLNEGDILQIFIDLKFHKTSSNIILCHEVFSDNLLLKKVNNLKMRIEIFWELREIIEKT
DLLNNEFSLNTLLLKYWYAIAVRYNLKEAIQYFYQKYTHLNTWRLTCALCENNVFDLHEAYEKDKICMDLEEMMRIACIKDHS
LSTIYYCYMLGANINQAMLTSIQYYNIENIFFCMDLGADAFEEGMALVGQEGYEPIRNILSLKIYSPATTPLPKSTDPEIIDH
ELKNYFSKNMMVFLTYDLR*
Ken06.Bus MGF 360 12L protein
SEQ ID No. 169
MLPSLQSLTKKVLARQCLPEDQHYLLKCYDLWWNNAPITFDHNLRLIKLAGIQEGLDLNMALVKAVKENNYSLIKLFTEWGAN
INYGLISVNTEHTWDLCRELGAKKTLNEGDILQIFIDLKFYKTSSNIILCHEVFSDNLLLKRVNNLKMRIEIFWELREIIEKT
DLLNNEFSLNTLLLKYWYAIAVRYNLKEAIQYFYQKYTHLNTWRLTCALCENNVEDLHEAYEKDKICMDLEEMMRIACIKDHN
LSTIYYCYMLGANINQAMLTSIQYYNIENIFFCMDLGADAFEEGMALVGQEGYEPIRNILSLKIYSPATTPLPKSTDPEIIDH
ALKNYFSKNMMVFLTYDLR*

### MGF 360 13L Protein Sequences

Georgia 2007/1 MGF 360 13L protein
SEQ ID No. 170
MSLPLSLQTLVKKTIASQCLSIDEHCILKYCGLWWHDAPLKLCMDRGRIQIKSGFLGEDIDLRVALIIAVKENNYSLIKLFTE
WGANINYGLLSINTKHIRELCRQLGAKETLEDNDIFRIFTRIMHNKTSGSIILCHEIFMNNPILENKFVIQLRGLIYKRLWGL
IEIKETDELNGLLVKYWYAKAVQYDCKDAICFLDEKYTDLNEWRLKCLLYYNKIYELHEMYHKENIQIDVHDMICLASTKDNN
PLTIYYCYALGGNINQAMLTSVQYYNIGNIFFCIDLGGNAFEEGRAIAEQKGYNFLSHSLALDIYSSDASLPLNLKDPEEISS
LLKDYKSKNLSIIWEYSHNIL*
China/2018/AnhuiXCGQ MGF 360 13L protein
SEQ ID No. 171
MSLPLSLQTLVKKTIASQCLSIDEHCILKYCGLWWHDAPLKLCMDRGRIQIKSGFLGEDIDLRVALIIAVKENNYSLIKLFTE
WGANINYGLLSINTKHIRELCRQLGAKETLEDNDIFRIFTRIMHNKTSGSIILCHEIFMNNPILENKFVIQLRGLIYKRLWGL
IEIKETDELNGLLVKYWYAKAVQYDCKDAICFLDEKYTDLNEWRLKCLLYYNKIYELHEMYHKENIQIDVHDMICLASTKDNN
PLTIYYCYALGGNINQAMLTSVQYYNIGNIFFCIDLGGNAFEEGRAIAEQKGYNFLSHSLALDIYSSDASLPLNLKDPEEISS
LLKDYKSKNLSIIWEYSHNIL*
Tengani 62 MGF 360 13L protein
SEQ ID No. 172
MSLPLSLQTLVKKTVANQSLSIDEHCILKHCGLWWHDVPLKLCMDRGQIQIKSGFLGEDIDLHIALIIAVKENNYSLIKLFTE
WGANINYSLLSINTKHIRELCRQLGAKETLEDDDIFRIFTKIMHNKTSGSIILCHDIFMNNPNIEDKFTIQLRGLIYKRLWGL
IEIKETDELNGLLVKYWYAKAVQYECKDAICFLDEKYTDLNEWRLKCLLYYNKIYELHEMYHKENIQIDVHDMICLASTKDNN
PLTIYYCYALGGNINQAMLTSVQYYNIGNIFFCIDLGGNAFEEGRAIAEQKGYNFLSHSLALDIYSSDASLPLNLKDPEEISS
LLKDYKSKNLSIIWEYSHNIL*
Warthog MGF 360 13L protein
SEQ ID No. 173
MSLPLSLQTLVKKTVASQCLSTDEHCILKHCGLWWHDVPLKLCMDRGQIQIKSGFLGEDIDLHIALIIAVKENNYSLIKLFTE
WGAHINYSLLSINTEHIRELCRQLGAKETLEDNDIFRIFTKIMHNKTSGRIILCHEIFMNNPNIENKFTIQLRGLICKRLWGL
IEIKETDELNDLLVKYWYAKAVQYECKDAICFLDEKYTDLNEWRLKCLLYYNKIYELHEMYHKEKVQIDVHDMICLASTKDNN
PLTIYYCYALGGNINQAMLTSVQYYNIGNIFFCIDLGGNAFEEGRAIAEQKGYHFLSHSLTLDIYSSDASLPLNLKDPEEISS
LLKDYKSKNLSIIWEYSHNIL*
Warmbaths MGF 360 13L protein
SEQ ID No. 174
MSLPLSLQTLVKKTVASQCLSTDEHCILKHCGLWWHDVPLKLCMDRGQIQIKSGFLGEDIDLHVALIIAVKENNYSLIKLFTE
WGAHINYSLLSINTEHIRELCRQLGAKKTLEDNDIFRIFTKIMHNKTSGRIILCHEIFMNNPNIENKFTIQLRGLICKRLWRL
IEIKETDELNDLLVKYWYAKAVQYECKDAICFLDEKYTGLNEWRLKCLLYYNKIYELHEMYHKDKVQIDVHDMICLASTKDNN
PLTIYYCYALGGNINQAMLTSVQYYNIGNIFFCIDLGGNAFEEGRAIAEQKGYHFLSHSLALDIYSSDASLPLNLKDPEEISS
LLKGYKSKNLSIIWEYSHNIL*
Pretorisuskop/96/4 MGF 360 13L protein
SEQ ID No. 175
MSLPLSLQTLVKKTVASQCLSIDEHCILKHCGLWWHDVPLKLCMDRGQIQIKSGFLGEDIDLHIALIIAVKENNYSLIKLFTE
WGAHINYSLLSINTEHIRELCRQLGAKETLEDDDVFRIFTKIMHNKTSGRIILCHDIFMNNPNIENKFTIQLRGLICKRLWGL
IEIKETDELNDLLVKYWYAKAVQYECKDAICFLEEKYTDLNEWRLKCLLYENKIYELHEMYHKEKVQIDVHDMICLASTKDNN
PLTIYYCYALGGNINQAMLTSIQYYNIGNIFFCIDLGGNAFEEGRAIAEQKGYNFLSHSLALDIFSSDASLPLNLKDPEEISS
FLKDYKSKNLSIIWEYSHNIL*
Mkuzi 1979 MGF 360 13L protein
SEQ ID No. 176
MSLPLSLQTLVKKTVASQCLSIDEHCILKYCGLWWHDAPLKLCMDRGRIQIKSGFLGEDIDLRVALIIAVKENNYSLIKLFTE
WGANINYSLLSINTKHIRELCRQLGAKETLEDNDIFRIFTRIMHNKTSGSIILCHEIFMNNPILENKFVIQLRGLIYKRLWGL
IEIKETDKLNDLLVKYWYAKAVQYVCKNAICFLDEKYTDLNEWRLKCLLYYNKIYELHEMYHKKKVQIDVHDMICLACAKDNN
LLTIYYCYALGSNINQAMLTSVQYYNIGNIFFCIDLGGNAFEEGRAIAEQKGYNFLSHSLTLDIYSSDASLPLNLKDPEEISS
LLKDYKSKNLSIIWEYSHNIL*
L60 MGF 360 13L protein
SEQ ID No. 177
MSLPLSLQTLVKKTVASQCLSIDEHCILKYCGLWWHDAPLKLCMDRGRIQIKSGFLGEDIDLRVALIIAVKENNYSLIKLFTE
WGANINYSLLSINTKHIRELCRQLGAKETLEDNDIFRIFTRIMHNKTSGSIILCHEIFMNNPMLENKFVIQLRGLIYKRLWGL
IEIKETDELNDLLVKYWYAKAVQYVCKNAICFLDEKYTDLNEWRLKCLLYYNKIYELHEMYHKKKVQIDVHDMICLACAKDNN
LLTIYYCYALGGNINQAMLTSVQYYNVGNIFFCIDLGGNAFEEGRAIAEQKGYNFLSHSLTLDIYSSDASLPLNLKDPEKISS
LLKDYKSKNLSIIWEYSHNIL*
Benin 97/1 MGF 360 13L protein
SEQ ID No. 7
MSLPLSLQTLVKKTVASQCLSIDEHCILKYCGLWWHDAPLKLCMDRGRIQIKSGFLGEDIDLRVALIIAVKENNYSLIKLFTE
WGANINYSLLSINTKHIRELCRQLGAKETLEDNDIFRIFTRIMHNKTSGSIILCHEIFMNNPMLENKEVIQLRGLIYKRLWGL
IEIKETDELNDLLVKYWYAKAVQYVCKNAICFLDEKYTDLNEWRLKCLLYYNKIYELHEMYHKKKVQIDVHDMICLACAKDNN
LLTIYYCYALGGNINQAMLTSVQYYNVGNIFFCIDLGGNAFEEGRAIAEQKGYNFLSHSLTLDIYSSDASLPLNLKDPEKISS
LLKDYKSKNLSIIWEYSHNIL*
Malawi Lil-20/1 (1983) MGF 360 13L protein
SEQ ID No. 178
MSAPLSLQTLVKKTVASTSCLSIDEHILKYCDLWWHDAPLKLYMDRGRIQIKSGFLGEDIDLCVALIIAVKENNYNLIKLFTE
LGANINYSLLSINTKHVRDLCRQLGAKETLEDYDIFCIFNKIMHNKTSGSVILCHEIFINNPNLENKFAAQLRRLIYKRLCGL
IEIKETDELSELLVKYWYAKAVQYDYKDAICFLDEKYTDLNEWRLKCYLYYNKIYELHDIYHKEKIQIDVNEMLSLACIRDNN
PLTIYYCYALGGNINQAMLTSVQYYNIGNIYFCIDLGGNAFEEGSAIARQKGYNFLSHSLVLNIYSSDASLPLNLKDPEEISS
LLKNYKSKNLSIILDYSHNIL*
Kenya 1950 MGF 360 13L protein
SEQ ID No. 179
MSSPLSLQTLVKKTVASTSCLSIDEHILKYCGLWWHDAPLKLYIDRGRIYIKSGFLGEDIDLCVALIIAVKENNYSLIKLFTE
WGAYINYSLLSINTKHARDLCRQLGAKETLDDYDIFCIFNKIMHNKTSGSIILCHEIFINNPKLENNFAAQLRRLIYKRLCGL
IEIKETDELSELLVKYWYANAVQYDHKDAICFLDEKYTDLDEWRLKCYLCYNKIYELHDIYHKKKIQIDVNEMLSLACIRDNN
LLTIYYCYALGGNINQAMLTSVQYYNIGNIYFCIDLGGNAFEEGSAIARQNGYNFLCHSLILNIYSSDASLPLNLKVPEEISS
LLKNYKSKNLSIILDYSHKIL*
Ken06.Bus MGF 360 13L protein
SEQ ID No. 180
MSSPLSLQTLVKKTVAGTSCLSIDEHILKYCGLWWHDAPLKLYIDRGRIYIKSGFLGEDIDLCVALIIAVKENNYSMIKLFTE
WGAYINYSLLSINTKHARDLCRQLGAKETLDDYDIFCIFNKIMHNKTSGSIILCHEIFINNPNLENNFAAQLRRLIYKRLCGL
IEIKETDELSELLVKYWYANAVQYDHKDAICFLDEKYTDLDEW*LKCYLCYNKIYELHDIYHKEKIQIDVNEMLSLACIRDNN
LLTIYYCYALGGNINQAMLTSVQYYNIGNIYFCIDLGGNAFEEGSAIARQNGYNFLSHSLVLNIYSSDASLPLNLKDPEEISS
LLKNYKSKNLSIILDYSHKIL*

### MGF 360 14L Protein Sequences

Georgia 2007/1 MGF 360 14L protein
SEQ ID No. 181
MLSLQTLAKKVVACNYLSSDYDYTLQRFGLWWDLGPIHLCNNCKQVFSYKHLQCFSEDDLCLEAALVKAVKSDNLELIRLFVD
WGANPEYGLIRVPAVYLKRLCAELGGLTPVSEPRLLEILKEVARLKSCAGVLLGYDMFCHNPLLETVTRTTLDTVTYTCSNIP
LTGDTAHHLLTKFWFALALRHNFTKAIHYFYKRHKNHLYWRVACSLYENNIFDIHELCREKEICISPNLMMKFACLREKNYAA
IYYCHRLGASLDYGMNLSIYNNNTLNMFFCIDLGAADFDRAQLIAHKAYMYNLSNIFLVKQLFSRDVTLVLDVTEPQEIYDML
KTYTSKNLKRAEEYLTAHPEIIVID*
China/2018/AnhuiXCGQ MGF 360 14L protein
SEQ ID No. 182
MLSLQTLAKKVVACNYLSSDYDYTLQRFGLWWDLGPIHLCNNCKQVFSYKHLQCFSEDDLCLEAALVKAVKSDNLELIRLFVD
WGANPEYGLIRVPAVYLKRLCAELGGLTPVSEPRLLEILKEVARLKSCAGVLLGYDMFCHNPLLETVTRTTLDTVTYTCSNIP
LTGDTAHHLLTKFWFALALRHNFTKAIHYFYKRHKNHLYWRVACSLYFNNIFDIHELCREKEICISPNLMMKFACLREKNYAA
IYYCHRLGASLDYGMNLSIYNNNTLNMFFCIDLGAADFDRAQLIAHKAYMYNLSNIFLVKQLFSRDVTLVLDVTEPQEIYDML
KTYTSKNLKRAEEYLTAHPEIIVID*
Tengani 62 MGF 360 14L protein
SEQ ID No. 183
MLSLQTLAKKVVACNYLSSDYDYTLQRFGLWWDLGPIHLCNNCKQIFSYKHVQCFSEDDLCLEAALVKAVKSDNLELIRLFVD
WGANPEYGLIRVPAVHLKRLCTELGGLTPVSESRLLEILKEVARLKSCAGVLLGYDMFCHNPLLETVTRTTLDTVTYTCSNIP
LTGDTAHHLLTKFWFALALRHNFTKAIHYFYKRHKNHLYWRVACSLYFNNIFDIHELCREKEICISPNLMMKFACLQKKNYAA
IYYCYRLGASLDYGMNLSIYNNNTLNMFFCIDLGATDFDRAQRIAHKAYMYNLSNIFLVKQLFSRDVTLALDVTEPQEIYDML
KSYTSKNLKRAEEYLTAHPEIIVID*
Warthog MGF 360 14L protein
SEQ ID No. 184
MLSLQTLAKKVVACNYLSSDYDYMLQRFGLWWDLGPIHLCNNCKQIFSYKHLQCFSEDDLCLEAALVKAVKSDNLELIRLFVD
WGANPEYGLIRVPAVHLKRLCTELGGLTPVSEPRLLEILKEVAKLKSCAGVLLGYDMFCHNPLLETVTRTTLDTVTYTCSNIP
LTGDTAHHLLTKFWFALALRHNFTKAIHYFYKRHKNHLYWRVACSLYENNIFDIHELCREKEICISPNLMMKFACLRKKNYAA
IYYCYRLGASLDYGMNLSIYNNNTLNMFFCIDLGATDFDRAQRIAHKTYMYNLSNIFLVKQLFSRDVTLALDVTEPQEIYDML
KSYTSKNLKRAEEYLTAHPEIIVID*
Warmbaths MGF 360 14L protein
SEQ ID No. 185
MLSLQTLAKKVVACNYLSSDYDYMLQRFGLWWDLGPIHLCNNCKQIFSYKHLQCFSEDDLCLEAALVKAVKRDNLELIRLFVD
WGANPEYGLICVPTVHLKRLCTELGGLTPVSEPRLLEILKEVANLKSCAGVLLGYDMFCYNPLLETITRTTLDTVMYSCSKIP
LMGDTAHHLLTKFWFALALRHNFTKAIHYFYKRHKNHLYWRVACSLYFNNIFDIHELCREKEICISPNLMMKFACLREKNYAA
IYYCYRLGASLDYGMNLSIYNNNSLNLFFCIDLGATDFDRAQRIAHKAYMYNLSNILLVKQLFSRDVTLALDVTEPQEIYDRL
KAYTSKNMKRAEEYLTAHPEIIVID*
Pretorisuskop/96/4 MGF 360 14L protein
SEQ ID No. 186
MLSLQTLAKKVVACNYLSSDYDYTLQRFGLWWDLGPIHLCNNCKQIFSYKHLQCFSEDDLCLEAALVKAVKSDNLELIRLFVD
WGANPEYGLIRVPAVHLKRLCTELGGLTPVTEPRLLEILKEVAKLKSCAGVLLGYDMFCHNPLLETVTRTTLDTVTYTCSNIP
LTGDTAHLLLTKFWFALALRHNFTKAIHYFYKRHKNHLYWRVACSLYENNIFDIHELCREKEICISPNLMMKFACLQKKNYAA
IYYCYRLGASLDYGMNLSIYNNNTLNMFFCIDLGATDFDRAQHIAHKAYMYNLSNIFLVKQLFSRDVTLALDVTEPQEIYDRL
KSYTSKNLKRAEEYLTAHPEIIVID*
Mkuzi 1979 MGF 360 14L protein
SEQ ID No. 187
MLSLQTLAKKVVACNYLSSDYDYTLQRFGLWWDLGPIHLCNNCKQVFSYKHLQCFSEDDLCLEAALVKAVKSDNLELIRLFVD
WGANPEYGLIRVPAVYLKRLCAELGGLTPVSEPRLLEILKEVANLKSCAGVLLGYDMFCHNPLLETVTRTTLDTVTYTCSNIP
LTGDTAHLLLTKFWFALALRHNFTKAIHYFYKRHKNQLYWRVACSLYFNNIFDIHELCREKEICISPNLMMKFACLREKNYAA
IYYCHRLGASLDYGMNLSIYNNNTLNMFFCIDLGAADFDRAQLIAHKAYMYNLSNIFLVKQLFSRDVTLVLDVTEPQEIYDML
KTYTSKNMKRAEEYLTAHPEIIVID*
L60 MGF 360 14L protein
SEQ ID No. 188
MLSLQTLAKKVVACNYLSSDYDYTLQRFGLWWDLGPIHLCNNCKQVFSYKHLQCFSEDDLCLEAALVKAVKSDNLELIRLFVD
WGANPEYGLIRVPAVYLKRLCAELGGLTPVSEPRLLEILKEVANLKSCAGVLLGYDMFCHNPLLETVTRTTLDTVTYTCSNIP
LTGDTAHLLLTKFWFALALRHNFTKAIHYFYKRHKNQLYWRVACSLYFNNIFDIHELCREKEICISPNLMMKFACLREKNYAA
IYYCHRLGASLDYGMNLSIYNNNTLNMFFCIDLGAADFDRAQLIAHKAYMYNLSNIFLVKQLFSRDVTLVLDVTEPQEIYDML
KTYTSKNMKRAEEYLTAHPEIIVID*
Benin 97/1 MGF 360 14L protein
SEQ ID No. 8
MLSLQTLAKKVVACNYLSSDYDYTLQRFGLWWDLGPIHLCNNCKQVFSYKHLQCFSEDDLCLEAALVKAVKSDNLELIRLFVD
WGANPEYGLIRVPAVYLKRLCAELGGLTPVSEPRLLEILKEVANLKSCAGVLLGYDMFCHNPLLETVTRTTLDTVTYTCSNIP
LTGDTAHLLLTKFWFALALRHNFTKAIHYFYKRHKNQLYWRVACSLYFNNIFDIHELCREKEICISPNLMMKFACLREKNYAA
IYYCHRLGASLDYGMNLSIYNNNTLNMFFCIDLGAADFDRAQLIAHKAYMYNLSNIFLVKQLFSRDVTLVLDVTEPQEIYDML
KTYTSKNMKRAEEYLTAHPEIIVID*
Malawi Lil-20/1 MGF 360 14L protein
SEQ ID No. 189
MLSLQTLAKKVVACNYLSSDYDYTLQRFGLWWDLGPIHLCNTCKQIFSYKHLQCFSEDDLCLEAALVKAVKSDNLELIRLFVD
WGANPEYGLIRVPAVHLKRLCMELGGLTPVSESRLLEILKEVADLKSCAGVLLGYDMFCHNPLLETVTRTTLDTVMYTRSKIP
LTGDTAHLLLSKFWFALALRHNFTKAIHYFYEKHKNQLYWRLTCSLYENNIFDLHELCCKKEICISPNLMMKFACLREENYAA
IYYCHMLGASLDYGMNLSIYNNNTLNLFFCIDLGATNFDRARLIARRVYMYNLSNLFLVKQLFSRDVSLILDLTEPQAIYDML
NTYTSKNLKQAEEYFTAHPEIVVID*
Kenya 1950 MGF 360 14L protein
SEQ ID No. 190
MLSLQTLAKKVVACNYLSSDYDYTLQRFGLWWDLGPIHLCNTCKQIFSYQHLQCFSEDDLCLDAALVKAVKSDNLELIRLFVD
WGANPEYGLIRVPAVDLKRLCTELGGLTPVSESRLLEILKEVADLKSCAGVLLGYDMFCHNPLLETVTRTTLNTVMYTRSKIP
LTGDTAHLLLTKFWFALALRHNFTKAIHYFYEKHKNQLYWRLACSLYFNNIFDLHELCSKKEICISPNLMMKFACLREENYAA
IYYCHMLGASPDYGMNLSIYNNNTLNLFFCIDLGATNFDRARLIAHRVYMYNLSNIFLVKQLFSRDASLVLNITEPQAIYDML
KTYTSKNLKRAEEYFTAHPEIVVID*
Ken06.Bus MGF 360 14L protein
SEQ ID No. 191
MLSLQTLAKKVVACNYLSSDYDYTLQRFGLWWDLGPIHLCNTCKQIFSYQHLQCFSVDDLCLDAALVKAVKSDNLELIRLFVD
WGANPEYGLIRVPAVHLKRLCTELGGLTPVSESRLLEILKEVADLKSCAGVLLGYDMFCHNPLMETVTRTTLNTVMYTRSKIP
LTGDTAHLLLTKFWFALALRHNFTKAIHYFYEKHKNQLYWRLTCSLYFNNIFDLHELCSKKEICISPNLMMKFACLREENYAA
IYYCHMLGASPDYGMNLSIYNNNTLNLFFCIDLGATNFDRARLIAHRVYMYNLSNIFLVKQLFSRDASLVLNITEPQAIYDML
KTYTSKNLKRAEEYFTAHPEIVVID*

### MGF 505 1R Protein Sequences

Georgia 2007/1 MGF 505 1R protein
SEQ ID No. 192
MFSLQNLCRKTLPNRKLPEFFDEYILQLLGLYWENHGTIQRAGNNCVLIQQHTLIPVNEALRTAASEENYEIVSLLLAWEGNL
YYAIIGALEGNRHDLIRKYDDQIKDHHEILPFIDDPVIFHKCHIMRQCFFDCILYQAVKYSKFRVLLYFKHRLEDDLPFTHLL
IEKACKDHNYEVIKWIYENLHIYNMIDTFECAIAHKDLHLYCLGYRFIYNRIVPDKYHHLDIRMLSSLQLLHKVAAKGYLDFI
LETLKYDHNKDNINIILTQAATYNHRKILIYFIPQSTHAQIEQCLLVAIKAKSSRKTLNLLLSHLNLSINLIKKISHYVATYN
STNIIGILSMRRKKKIYLDIILTKFVKKAIFNKFVVRCMDTFSINPERILKIAARINRMMLVKKISEHVWKNHAVRLKYLKHA
VHTMKHKDGKNRLMNFIYDRCYYHMQGEEIFSLARFYAIHHAPKLFDVFYDCCILDTIRFKSLLLDCSHIIGKNAHDATNINI
VNKYIGNLFVMGVLSKKEILQDYPSIYSKQYMP*
China/2018/AnhuiXCGQ MGF 505 1R protein
SEQ ID No. 193
MFSLQNLCRKTLPNRKLPEFFDEYILQLLGLYWENHGTIQRAGNNCVLIQQHTLIPVNEALRTAASEENYEIVSLLLAWEGNL
YYAIIGALEGNRHDLIRKYDDQIKDHHEILPFIDDPVIFHKCHIMRQCFFDCILYQAVKYSKFRVLLYFKHRLEDDLPFTHLL
IEKACKDHNYEVIKWIYENLHIYNMIDTFECAIAHKDLHLYCLGYRFIYNRIVPDKYHHLDIRMLSSLQLLHKVAAKGYLDFI
LETLKYDHNKDNINIILTQAATYNHRKILIYFIPQSTHAQIEQCLLVAIKAKSSRKTLNLLLSHLNLSINLIKKISHYVATYN
STNIIGILSMRRKKKIYLDIILTKFVKKAIFNKFVVRCMDTFSINPERILKIAARINRMMLVKKISEHVWKNHAVRLKYLKHA
VHTMKHKDGKNRLMNFIYDRCYYHMQGEEIFSLARFYAIHHAPKLFDVFYDCCILDTIRFKSLLLDCSHIIGKNAHDATNINI
VNKYIGNLFVMGVLSKKEILQDYPSIYSKQYMP*
Tengani 62 MGF 505 1R protein
SEQ ID No. 194
MFSLQNLCRKTLPDCKLPEFFDEYILQLLGLYWENHGTIQRAGNNCVLIQQHNLIPVNEALRIAASEENYEIVSLLLAWEGNL
YYAIIGALEGNRHDLIRKYDDQIKDHHEILPFIDDPVIFHKCHIMRQCFFDCILYQAVKYSKFRVLLSFKHRLRDDLPFTHLL
IEKACKDHNYEVIKWIYENLHIYNMIDTFECAIAHKDLRLYCLGYRFIYNRIVPDKYHHLDIRMLSSLQLLHKVAAKGYLDFI
LETLKYDHNKDNINIILTQAATYNHRKILIYFIPQSTHAQIEQCLLVAIKTKSSKKTLNLLLSHLNLSINLIKKISHYVATYN
STNIIGILSMRRKKKIYLDIILTKFVKKAIFNKFVVRCMDTFSINPERILKIAARINRTMLVKKISEHVWKNHAVRLKYLKHA
VHTMKHKDGKNRLMNFIYDRCYYHMQGEEIFSLARFYAIHHAPKLFDVFYDCCILDTIRFKSLLLDCSHIIGKNAHDATNINI
VNKYIGNLFVMGVLSKKEILQDYPSIYSKHYMP*
Warmbaths MGF 505 1R protein
SEQ ID No. 195
MFSLQNLCRKTLPDCKLPEFFDEYILQLLGLYWENHGTIQRAGNNCVLIQQRTLIPVNEALRIAASEENYEIVGLLLAWEGNL
YYAIIGALEGNRHDLIRKYDDQIKDHHEILPFIDDPVIFHKCHIIRRCFFNCILYQAVKYSKFRVLLYFKHRLEDDLPLTHLL
IEKACEDHNYEVIKWIYENLHTYDIMDTFECAIAHKDLRLYCLGYTFIYNRIVPYEYHHLDILILSSLQLLHKVAAKGYLDFI
LETLKYDHNNDNLDIILTQAATYNHRKILTYFIPQLTYAQIEQCLFMAIKRKSSKKTLNLLLSHLTLSIELIKKISQYVVTYN
STNIIGILSMKRKKKIYLDIMLTKYVKYAIFNKYVVRCMDRFSINPERIIKMAARINRMMLVKKISEHVWKNHAARLKHLKHA
VHTMKHKDGKNRLMNFIYDRCYYHMQGEEIFSLARFYAIHHAPKLFDVFYDCCILDTIQFKSLLLDCSHIIGKNAHDATNINI
VNKYIGDLFAMGVLSKKEILQDYPSIYSKHYML*
Mkuzi1979 MGF 505 1R protein
SEQ ID No. 196
MFSLQNLCRKTLPDCKLPEFFDDYILQLLGLYWENHGTIQRAGNNCVLIQQHTLIPINEALRTAASEENYEIVSLLLAWEGNL
YYAIIGALEGNRHDLIRKYDDQIKDHHEILPFIDDPVIFHKCHIMRRCFFDCILYQAVKYSKFRVLLYFKYRLEDDLPLTHLL
IEKACENHNYEVIRWIYENLHIYNMIDTFECAIAHKDLRLYCLGYTFIYNRIVPNKYHHIDILILSSLQLLHKVAAKGYLDFI
LETLKYDHNNDNLDIILTQAATYNHRKILTYFIPQSTYAQIEQCLMVAIKTKSSKKTLNLLLSHLNLSIKLIKKISQYVVTYN
STNIIGILSMKRKKKIYLDILLTKFVKNAIFNKFVVRYMDTFSINPEKIVKMAARINKMMLVKKISEHIWKNHAARLEHLKHA
VHTMKHKDGKNRLMNFIYEYCYYHMQGEEIFSLARFYAIHHAPKLFDVFYNCCILDTIRFKSLLLDCSHIIGKNAHDATNINI
VNKYIDNLFAMGVLSKKEILQDYPSIYSKHYMP*
Warthog MGF 505 1R protein
SEQ ID No. 197
MFSLQNLCRKTLPDCKLPEFFDEYILQLLGLYWENHGTIQRAGNNCVLIQQHTLIPVNEALRIAASEENYEIVSLLLAWEGNL
YYAIIGALEGNRHDLIRKYDDQIKDHHEILPFIDDPVIFHKCHIMRRCFFDCILYQAVKYSKFRVLLYFKYRLENDLPLAHLL
IKKACEDHNYEVIKWIYENLHIYNIMDTFGCAIAHKDLRLYRLGYTFIYNRIVPYKYHYLDVLILSGLHLLYKVAAKGYLDFI
LETLKYDHNNDNLDIILTQAATYNHRKILTYYIPQLTYAQIEQCLFMAIKKKSSKKTLNLLLSHLKLSIKLIKKISQYVATYN
STNIIGILNMRRKKKIYLDIILTKFVKKAIFNKFVVRCMDTFSINPERIIKMAARINKMLLVKKISEHAWKNHAARLKHLKHA
VYTMKHKDGKNRLMNLIYDHYYYHMQGEEIFSLARFYAIHHAPKLFDVFYDCCLLDTIRFKNLLLDCSHIIGKNAHDATNITI
VNKYIGNLFAMGVLSKKEILQDYPSIYSKHYMP*
L60 MGF 505 1R protein
SEQ ID No. 198
MFSLQNLCRKTLPDCKLPEFFDDYILQLLGLYWENHGTIQRAGNNCVLIQQHTLIPVNEALRIAASEENYEIVGLLLAWEGNL
YYAIIGALEGNRYNLIRKYDDQIKDHHDILPFIDDPIIFHKCHIMRRCFFDCILYQAVKYSKFRVLLYFKYTLEDDLPLVHLL
IEKACEDHNYEVIKWIYENLHVCHIIDTFDCAIAHKDLRLYCLGYTFIYNRIVPYKYHHLDILILSSLQLLHKVAAKGYLDFI
LETLKYDHNIDNLDVILTQAATYNHRKILTYFIPQSTYAQIEQCLFVAIKTKSSKKTLNLLLSHLNLSIKLIQKISQYVATEN
STNIIGILSMKRKKKIYLDIILTKFVKNAIFNKFVVRCMERFSINPERIVKMAARINKMMLVKKISEHVWKNHAARLKHLKHA
VHTMKHKDGKNRLMNFIYEHCYYHMQGEEIFSLARFYAIHHAPKLFDVFYNCCILDTIRFKSLLLDCSHIIGKNAHDATNINI
VNKYIGNLFAMGVLSKKEILQDYPSIYSKHYMP*
Benin 97/1 MGF 505 1R protein
SEQ ID No. 9
MFSLQNLCRKTLPDCKLPEFFDDYILQLLGLYWENHGTIQRAGNNCVLIQQHTLIPVNEALRIAASEENYEIVGLLLAWEGNL
YYAIIGALEGNRYNLIRKYDDQIKDHHDILPFIDDPIIFHKCHIMRRCFFDCILYQAVKYSKFRVLLYFKYTLEDDLPLVHLL
IEKACEDHNYEVIKWIYENLHVCHIIDTFDCAIAHKDLRLYCLGYTFIYNRIVPYKYHHLDILILSSLQLLHKVAAKGYLDFI
LETLKYDHNIDNLDVILTQAATYNHRKILTYFIPQSTYAQIEQCLFVAIKTKSSKKTLNLLLSHLNLSIKLIQKISQYVATEN
STNIIGILSMKRKKKIYLDIILTKFVKNAIFNKFVVRCMERFSINPERIVKMAARINKMMLVKKISEHVWKNHAARLKHLKHA
VHTMKHKDGKNRLMNFIYEHCYYHMQGEEIFSLARFYAIHHAPKLFDVFYNCCILDTIRFKSLLLDCSHIIGKNAHDATNINI
VNKYIGNLFAMGVLSKKEILQDYPSIYSKHYMP*
Pretorisuskop/96/4 MGF 505 1R protein
SEQ ID No. 199
MFSLQNLCRKTLPDCKLPEFFDEYILQLLGLYWENHGTIQRAGNNCVLVQQHTLIPVNEALRIAASEENYEIVSLLLAWEGNL
YYAIIGALEGNRHDLIRKYDDQIKDHHEILPFIDNPVIFHKCHIMRRCFFDCILYQAVKYSKFRVLLYFKYRLENDLPLAHLL
VEKACEDHNYEVIKWLYENLHIYNIMETFECAIAHKDLRLYRLGYTFIYNRIVPYKYHYLDVLILSGLHLLYKVAAKGYLDFI
LETLKYDHNNDNLDIILTQAVTYNHRKILTYYIPQLTYAQIEQCLFMAIKKKSSKKTLNLLLSHLKLSIKLIKKISQYVATYN
STNIIGILNMKRKKKIYLDIILTKFVKYAIFNKYVVRCMDTFSINPERIIKMAARINKMLLVKKISQHAWKNHAARLKHLKHA
VYTMKHKDGKNRLMNLIYDHYYYHMQGEEIFSLARFYAIHHAPKLFDVFYDCCLLDTIRFKSLLLDCSHIIGKNAHDATNITI
VNKYIGNLFAMGVLSKKEILQDYPSIYSKHYMP*
Kenya 1950 MGF 505 1R protein
SEQ ID No. 200
MFSLQNLCRKTLPDRKLPEFFDDYVLQLLGLYWENHGTIQRAGNNCVLIQQHNLIPVNEALRIAASEENYEIVSLLLAWEGNL
YYAIIGALEGNRHNLIRKYDDQIKDHHEILPFIDDPVIFHKCHMMRRCFFNCILYQAVKYSKFSVLLYFKYILKENLPLVHSL
IEKACEDHNYEVIKWIYENLHIYEIMDTFKCAIAHKDLHLYSLGYTFIYNRIVPYKYHHLDIRILSRLQLLHKVTAKGYLDFI
LETLKYDHNKDNINIILTQAATYNHRNILTYFIPQSTYAQIEQCLFVAIKINASKKTLNLLLSHLNLSIKLVKKLSQYVVAYK
STNIISILSMQQKKKIYLDIILTKVVKNAIFIKFVIGCMVTFSINPERIVKMAARIKKMKLVKNISEHVWKNHAAKLKHLKHA
VHTMKHQEGKNRLMNFIYDHCYYHMQGEEIFSLARFYAIHHAPKLFDVFYDCCILDTIRFKSLLLDCSYIIAKNAHDASINIV
NKYIGNLFAMGVLSKKEILQDYPSIYSKDYML*
Ken06.Bus MGF 505 1R protein
SEQ ID No. 201
MFSLQNLCRKTLPDCKLPEFFDDYVLQLLGLYWENHGTIQRAGNNCVLIQQHNLIPVNEALRIAASEENYEIVSLLLAWEGNL
YYAIIGALEGNHHNLIRKYDDQIKDHHEILPFIDDPVIFHKCHTMRRCFFNCILYQAVKYSKFSVLLYFKYILKENLPLVHSL
IEKAYKYHNYEVIKWIYENLHIYDIINTFKCAIAHKDLRLYCLGYTFVYNRIVPYKYYHLDIRILLRLQLLHKVTAKGYLDFI
LETLKYDHNTNNIDIILTQAATYNHRNILTYFIPQSTYAQIEQCLFVAIKINASKKTLNLLLSHLNLSIKLVKKLSQYVVAYK
STNIISILSRQQKKKIYLDIILTKVVKNAVFNKFVIGCMVTFSINPERIVKMAARIKKMKLVKNISEHVWKNHAVKLKYLKHA
VHTMKHQEGKNRLMNFIYDHCYYHMQEEEIFSLARFYAIHHAPKLFDVFYDCCILDTIRFKSLLLDCSHIIVKNAHDASINIV
NKYIGNLFAMGVLSKKEILQDYPSIYSKDYML*
Ken05/Tk1 MGF 505 1R protein
SEQ ID No. 202
MFSLQNLCRKTLPDCKLPEFFDDYVLQLLGLYWENHGTIQRAGNNCVLIQQHNLIPVNEALRIAASEENYEIVSLLLAWEGNL
YYAIIGALEGNRHNLIRKYDDQIKDHHEILPFIDDPVIFHKCHIMRRCFFNCMLYQAVKYSKFSVLLYFKYILKENLPLVHSL
IEKAYKYHNYEVIKWIYENLHIYDIINTFKYAIAHKDLRLYCLGYTFVYNRIVPYKYYHLDIRILLRLQLLHKVTAKGYLDFI
LETLKYDHNTNNIDIILTQAATYNHRNILTYFIPQSTYAQIEQCLFVAIKINASKKTLNLLLSHLNLSIKLVKKLSQYVVAYK
STNIISILSMQQKKKIYLDIILTKVVKNAVFIKFVIGCMVTFSINPERIVKMAARIKKMKLVKNISEHVWKNHAAKLKHLKHA
VHTMKHQEGKNRLMNFIYDHCYYHMQGEEIFSLARFYAIHHAPKLFDVFYDCCILDTIRFKSLLLDCSHIIAKNAHDASINIV
NKYIGNLFAMGVLSKKEILQDYPSIYSKYDIL*
Malawi Lil-20/1 (1983) MGF 505 1R protein
SEQ ID No. 203
MFSLQNLCRKTLPDCKLPEFFDEYILQLLGLYWENHGTIQRAGNNCVLIQQHNLIPVNEALRIAASEENYEIVSLLLAWEGNL
YYAIIGALEGNRPDLIRKYDDQIKDHHEILPFIDDPIIFHKCHIMRRCFFNCILYQAVKYSKFRVLLYFKHRLGDDLPLTHLL
IEKACEDHNYEVIKWIYENLHSYNIMDTFECAIAHKDLRLYCLGYTFIYNRIVPYKYHHLDICILSSLQLLHKVAAKGYLDFI
LETLKYDHNINNIDIILTQAATYNHRKILTYFIPQLTYAQIEQCLLVAIKTKASKKTLNLLLSHLNLSIKLIKKISQYVVTYN
STNIISILSMRRKKKIYLDIILTEFVKNAIFNKFVVRCMDTFSINPERIVKMAARINRMMLVKNISERVWKNHAVKLKHLKHA
VHTMKHQEGKNRLMNFIYDHCYYHMQGEEIFGLARFYAIHHAPKLFDVFYDCCMLDATRFKSLLLDCPHIIGKNAYDAGINLV
NKYIGNLFAMGVLSKKEILQDYPSIYSKHDMF*

### DP148R

[0303] The DP148R gene is located close to the right end of the ASFV genome, at position 177915 to 178679 on the Benin 97/1 genome. The DP148R gene may also be referred to as MGF 360 18R. DP148R is expressed at early times post-infection. The amino acid sequence of the DP148R protein has no significant similarity to other proteins; the secondary structure is predicted to be predominantly helical, but no signal peptide or transmembrane domains are evident.

[0304] DP148R inhibits type I interferon. DP148R also inhibits activation of the NF-kB transcription factor (see FIG. 7). DP148R inhibits nuclear translocation of the p65 subunit of NF-kB (see FIG. 8). NF-κB controls expression of interferon and pro-inflammatory cytokines as part of the host's innate immune system response to viral infection. The inhibition of NF-κB by DP147R would results in decreased amounts of type I interferon (IFN) and pro-inflammatory cytokines and chemokines produced by cells infected with ASFV and allow ASFV to circumvent the host innate immune response, favouring virus replication and disrupting the development of adaptive responses.

[0305] The gene (i.e. nucleotide) sequences and positions in the genome of DP148R genes from different ASFV strains are presented below.

Georgia 2008/1 DP148R (MH910495.1:183350-184063)
SEQ ID No. 287
ATGTTAGAAATAGTATTGGCAACGCTGCTAGGCGACCTGCAGCGGCTCCGGGTTCTTACCCCTCAGCAGCGGGCAGTTGCCTT
CTTTCGAGCCAATACTAAGGAGCTAGAGGACTTCTTATGCTCAGATGGGCAGTCTGAGGAGGTACTGTCTGGCCCCCTTCTTA
ACCGTCTACTAGAACCCTCAGGCCCTCTTGATATTTTAACCGGATATCACCTATTTCGTCAGAATCCCAAGGCAGGTCAGTTG
CGCGGCCTTGAGGTCAAGATGCTTGAACGGTTATACGATGCTAATATTTACAATATACTGTCTCGGCTGCGGCCTGAAAAAGT
TCGCAACAAGGCTATTGAGCTATACTGGGTTTTCCGAGCTATCCATATTTGTCATGCTCCTTTAGTTTTAGATATTGTACGAT
ATGAGGAACCGGACTTTGCTGAACTGGCCTTTATTTGTGCTGCTTACTTTGGTGAACCTCAGGTAATGTATTTGCTCTACAAA
TATATGCCTCTGACCCGCGCAGTTCTTACGGATGCCATCCGGATAAGTCTTGAGAGCAACAACCAGGTAGGGATTTGCTATGC
TTACTTGATGGGAGGCAGCCTCAAGGGACTAGTCTCCGCCCCACTGCGTAAACGTCTGCGCGCCAAACTACGCTCGCAGCGCA
AAAAGAAGGACGTTCTTTCACCCCACGACTTCTTACTGCTGCTCCAGTAG
China/2018/AnhuiXCGQ DP148R (MK128995.1:183372-184085)
SEQ ID No. 288
ATGTTAGAAATAGTATTGGCAACGCTGCTAGGCGACCTGCAGCGGCTCCGGGTTCTTACCCCTCAGCAGCGGGCAGTTGCCTT
CTTTCGAGCCAATACTAAGGAGCTAGAGGACTTCTTATGCTCAGATGGGCAGTCTGAGGAGGTACTGTCTGGCCCCCTTCTTA
ACCGTCTACTAGAACCCTCAGGCCCTCTTGATATTTTAACCGGATATCACCTATTTCGTCAGAATCCCAAGGCAGGTCAGTTG
CGCGGCCTTGAGGTCAAGATGCTTGAACGGTTATACGATGCTAATATTTACAATATACTGTCTCGGCTGCGGCCTGAAAAAGT
TCGCAACAAGGCTATTGAGCTATACTGGGTTTTCCGAGCTATCCATATTTGTCATGCTCCTTTAGTTTTAGATATTGTACGAT
ATGAGGAACCGGACTTTGCTGAACTGGCCTTTATTTGTGCTGCTTACTTTGGTGAACCTCAGGTAATGTATTTGCTCTACAAA
TATATGCCTCTGACCCGCGCAGTTCTTACGGATGCCATCCGGATAAGTCTTGAGAGCAACAACCAGGTAGGGATTTGCTATGC
TTACTTGATGGGAGGCAGCCTCAAGGGACTAGTCTCCGCCCCACTGCGTAAACGTCTGCGCGCCAAACTACGCTCGCAGCGCA
AAAAGAAGGACGTTCTTTCACCCCACGACTTCTTACTGCTGCTCCAGTAG
OURT 88/3 DP148R (NC_044957.1:168827-169045)
SEQ ID No. 289
ATGCAAAATAAAATCCCAAATTTTAACCTTTTCTTTTTTTTTCTATACAGGATGTTAGAAATAGTATTGGCAACGCTGCTAGG
CGACCTGCAGCGGCTCCGGGTTCTTACCCCTCAGCAGCGGGCGGTTGCCTTCTTTCGAGCCAATACTAAGGAGCTAGAGGACT
TCTTACGCTCAGATGGGCAATCTGAGGAGATACTGTCTGGCCCCCCTCCTTAA
L60 DP148R (NC_044941.1:177973-178737)
SEQ ID No. 290
ATGCAAAATAAAATCCCAAATTTTAACCTTTTCTTTTTTTTTCTATACAGGATGTTAGAAATAGTATTGGCAACGCTGCTAGG
CGACCTGCAGCGGCTCCGGGTTCTTACCCCTCAGCAGCGGGCGGTTGCCTTCTTTCGAGCCAATACTAAGGAGCTAGAGGACT
TCTTACGCTCAGATGGGCAATCTGAGGAGATACTGTCTGGCCCCCTCCTTAACCGTCTACTAGAACCCTCATGCCCTCTTGAT
ATTTTAACCGGATATCACCTATTTCGTCAGAATCCCAAGGCAGGTCAGTTGCGCGGCCTTGAGGTCAAGATGCTTGAACGGTT
ATACGATGCTAATATTTACAATATATTGTCTCGGCTGCGACCTGAAAAAGTCCGCAACAAGGCTATTGAGCTATACTGGGTTT
TCCGAGCTATCCATATTTGTCATGCTCCTTTAGTTTTAGATATTGTACGATATGAGGAACCGGACTTTGCTGAACTGGCCTTT
ATTTGTGCTGCTTACTTTGGTGAACCTCAGGTAATGTATTTGCTCTACAAATATATGCCTCTGACCCGCGCAGTTCTTACGGA
TGCCATCCAGATAAGTCTTGAGAGCAACAACCAGGTAGGGATTTGCTATGCTTACTTGATGGGAGGCAGCCTCAAGGGACTAG
TCTCCGCCCCACTGCGTAAACGTCTGCGCGCCAAACTACGCTCGCAGCGCAAAAAGAAGGACGTTCTTTCACCCCACGACTTC
TTACTGCTGCTCCAGTAG
Benin 97/1 DP148R (NC_044956.1:177915-178679)
SEQ ID No. 291
ATGCAAAATAAAATCCCAAATTTTAACCTTTTCTTTTTTTTTCTATACAGGATGTTAGAAATAGTATTGGCAACGCTGCTAGG
CGACCTGCAGCGGCTCCGGGTTCTTACCCCTCAGCAGCGGGCGGTTGCCTTCTTTCGAGCCAATACTAAGGAGCTAGAGGACT
TCTTACGCTCAGATGGGCAATCTGAGGAGATACTGTCTGGCCCCCTCCTTAACCGTCTACTAGAACCCTCATGCCCTCTTGAT
ATTTTAACCGGATATCACCTATTTCGTCAGAATCCCAAGGCAGGTCAGTTGCGCGGCCTTGAGGTCAAGATGCTTGAACGGTT
ATACGATGCTAATATTTACAATATATTGTCTCGGCTGCGACCTAAAAAAGTCCGCAACAAGGCTATTGAGCTATACTGGGTTT
TCCGAGCTATCCATATTTGTCATGCTCCTTTAGTTTTAGATATTGTACGATATGAGGAACCGGACTTTGCTGAACTGGCCTTT
ATTTGTGCTGCTTACTTTGGTGAACCTCAGGTAATGTATTTGCTCTACAAATATATGCCTCTGACCCGCGCAGTTCTTACGGA
TGCCATCCAGATAAGTCTTGAGAGCAACAACCAGGTAGGGATTTGCTATGCTTACTTGATGGGAGGCAGCCTCAAGGGACTAG
TCTCCGCCCCACTGCGTAAACGTCTGCGCGCCAAACTACGCTCGCAGCGCAAAAAGAAGGACGTTCTTTCACCCCACGACTTC
TTACTGCTGCTCCAGTAG
Warthog DP148R (AY261366.1:180836-181548)
SEQ ID No. 292
ATGTTAGAAATAGTATTGGCAACGCTGCTAGGTGACCTGCAGCGGCTCCGGGTTCTTACCCCTCAGCAGCGGGCGGTTGCCTT
CTTTCGAGCCAATACTAAGGAGCTAGAGGACTTTTTATGCTCAGATGGGCAGTCTGAGGAGATACTGTCCGGCCCCCTCCTTA
ACCGTCTACTAGAACCCTCAGGCCCTCTTGATATTTTAACCGGATATCACTTATTTCGTCAGAATCCCAAGGCAGGTCAGGTG
CGCGGCCTTGAGGTCAAGATGCTTGAACGGTTATACGATGCTAATATTTACAATATATTGTCTCGGCTGCGACCTGAAAAAGT
TCGCAACAAGGCTGTTGAGCTATACTGGGTTTTTCGGGCTATCAATATGTGTCATGCTCCTTTAGTTTTAGATATTGTACGAT
ATGAGGAACCGGACTTTGCTGAACTGGCCTTTATTTGTGCTGCTTACTTTGGTGAACCTCAGGTAATGTATTTGCTCTACAAA
TATATGCCTCTGACCCGCGCAGTTCTTACGGATGCCATCCAGATAAGTCTTGAGAGCAACAGCCAGGTAGGGATTTGCTATGC
CTACTTGATGGGAGGCAGCCTCAAGGGCCTAGTCCGTGCCCCACTACGTAAACGTCTGCGCGCCAAACTACGCTCGCAGCGCA
AAAAGAAGGACGTTCTTCCACCCCATGACTTCTTACTGCTGCTCCAGTAA
Pretorisuskop/96/4 DP148R (AY261363.1:185149-185861)
SEQ ID No. 293
ATGTTAGAAATAGTATTGGCAACGCTGCTAGGTGACCTGCAGCGGCTCCGGGTTCTTACCCCTCAGCAGCGGGCGGTTGCCTT
CTTTCGAGCCAATACTAAGGAGGTAGAAGACTTCTTATGCTCAGATGGGCAGTCTGAGGAGGTACTGTCCGGCCCCCTCCTTA
ACCGTCTACTAGAACCCTCAGGCCCTCTTGATATTTTAACCGGATATCACTTATTTCGTCAGAATCCCAAGGCGGGTCAGGTG
CGCGGCCTTGAGGTCAAGATGCTTGAACGGTTATACGATGCTAATATTTACAATATATTGTCTCGGCTGCGACCTGAAAAAGT
TCGCAACAAGGCTGTTGAGCTATACTGGGTTTTTCGGGCTATCAATATGTGTCATGCTCCTTTAGTTTTAGATATTGTACGAT
ATGAGGAACCGGACTTTGCTGAACTGGCCTTTATTTGTGCTGCTTACTTTGGTGAACCTCAGGTAATGTATTTGCTCTACAAA
TATATGCCTCTGAGCCGCGCAGTTCTTACGGATGCCATCCAGATAAGTCTTGAGAGCAACAGCCAGGTAGGGATTTGCTATGC
CTACTTGATGGGAGGCAGCCTCAAGGGCCTAGTCCGTGCCCCACTACGTAAACGTCTGCGCGCCAAACTACGCTCGCAGCGCA
AAAAGAAGGACGTTCTTCCACCCCACGACTTCTTACTGCTGCTCCAGTAA
Tengani 62 DP148R (AY261364.1:179845-180557)
SEQ ID No. 294
ATGTTAGAAATAGTATTGGCAACGCTGCTAGGTGACCTGCAGCGGCTCCGGGTTCTTACCCCTCAGCAGCGGGCGGTTGCCTT
CTTTCGAGCCAATACTAAAGAGCTAGAGGACTTCTTATGTCCAGATGGGCAGTCTGAGGAGGTGCTGTCTGGCTCCCTCCTTA
ACCGTCTACTAGAACCCTCAGGCCCTCTTGATATTTTAACTGGATATCACCTATTTCGTCAGAATCCCAAGGCAGGTCAGTTG
CGCGGCCTTGAGGTCAAGATGCTTGAACGGTTATACGATGCTAATATTTACAACATATTGTCCCGGCTGCGACCTGAAAAAGT
TCGCAACAAGGCTGTTGAGCTATACTGGGTTTTTCGGGCTATCAATATGTGTCATGCTCCTTTAGTTTTAGATATTGTACGAA
ATGAGGAACTGGACTTTGCTGAACTGGCCTTTATTTGTGCTGCTTACTTTGGTGAGCCTCAGGTAATGTATTTGCTCTACAAA
TATATGCCTCTGACCCGCGCAGTTCTTACGGATGCCATCCAGATAAGTCTTGAGAGCAACAGCCAGGTGGGGATTTGCTATGC
CTACTTGATGGGAGGCAGCCTCAAGGGACTAGTCCGTGCCCCGCTACGTAAACGTCTGCGCGCCAAACTACGCTCGCAGCGCA
AAAAGAAGGATGTTCTTCCACCCCACGACTTCTTACTGCTGCTCCAGTAA
Ken06.Bus DP148R (NC_044946.1:181097-181870)
SEQ ID No. 295
ATGCAAAATAAAATCCCAAATTTTAACCTTTTCTTTTTTTTTCTATACAAGATGTTAGAAATAGTATTGGCAACGCTGCTGGG
TGATCTGCAGCAACTTAAGGATCTTACACCTAAGCAGCGGGCCGTAGCTTTCTTCCGAGCCAACACCAAAGAGCTAGAGGACT
TTCTCTACCCCGATGGGCAGACTGAGGAGTTACTCCCTGGATTTCTTCTTAACCATTTACTAGAACCCTCAGGCCCTATTGAA
ATTTTAACCGGATATCACCTCTTTCGTCAGAATCCAAAGGCAGGTCGCTTGCGAGGCCTTGAGGTGAAAATGCTTGAACGGTT
ATATGATGCTAATATTTACAATATGCTGGCTCGGCTACGGCCTGAGTTGGTTCGTGACAAGGCTGTTGAGCTATATTGGCTTT
TTCGAGCTATTTTAATATGTCATGGTCCCTTGGTTTTGGAGATTGTACGACATGAGACGTTGGACTTTGCAGAAACCGCCTTT
ATCTGTGCTGCTTACTTTAGTGAACCTCAGGTAATGTACGCTCTTTATAACTTTATACCACCCACTCATGCAGTCCTTGCTGA
TGCCATCCAGATGTGTCTTGAGAGCAACAGCGAGGCAGGGATTTGCTATGTCTACCTAATGGGAGGTAACCTCAAGGGCAAGG
TGCCCGGCTCGCTGCGCAAACGTCTGCGTGCCAGTCCACTTCGGCAAGAACGCAAAAAGAAAAACGTCCTTCCGCCCCACGAA
TTCCTACTCCTGCTCCACGGGATTTAA
Kenya 1950 DP148R (AY261360.1:189099-189872)
SEQ ID No. 296
ATGCAAAATAAAATCCCAAATTTTAACCTTTTCTTTTTTTTTCTATACAAGATGTTAGAAATAGTATTGGCCACGCTGCTAGG
TGATCTGCAGAAACTTAAGGATCTTACACCTCCGCAGCGGGCTGTGGCTTTCTTTCGAGCCAACACCAAAGAGCTAGAGGACT
TTCTCTACCCCGATGGGCAGTCTGAGGAGTTACTCCCTGGACTTCTCCTTAACCGTTTACTAGAACCTTCAGGTTCTATTGAC
ATTTTAACCGGTTACCACCTATTTCGTGAGAATCCAAAGGCAGGTCGCTTGCGAGGCCTTGAGGTGAAAATGCTTGAACGGTT
ATATGATGCTAATATTTACAATATGCTGGCTCGGCTACGGCCTGAGTTGGTTCGTGACAAGGCTATTGAGCTATATTGGCTCT
TTCGGGCTATTTTAATGTGTCATAGTCCCTTAGTTTTGGAGATTGTACGACATGAGACAATGGATTTTGCAGAAACCGCCTTT
ATCTGTGCCGCTTACTTTAGTGAACCTCAGGTAATGTACGCTCTTTATAAATTTATACCTATCTCTCGTGCAGTCCTTGCTGA
TGCCATTCAGATGTGTCTTGAGAGCAACAGCGAGGCGGGGATTTGCTATGCTTACCTAATGGGGGGTAGCCTCAAGGGCAAGG
TGCCTGGCTCGCTGCGCAAACGTCTGCGTGCCAGTCCACTTCGGCAAGAGCGCAAAAAGAAAAACGTCCTCCCGCCCCATGAA
TTCCTACTCATGCTCCATGGGATTTAA
Warmbaths DP148R (AY261365.1:184288-185048)
SEQ ID No. 297
ATGCAAAATAAAATCCCAAATTTTAACCTTTTCTTTTTTTTTCTATACAGGATGTTAGAAATAGTATTGGCAACGCTGCTAGG
TGACCTGCAGCGGCTCCGGGTTCTTACCCCTCAGCAGCGGGCGGTTGCCTTCTTTCGAGCCAATACTAAGGAGCTAGAGGACT
TCTTATGCTCAGATGGGCAGTCTGAGGAGATACTGTCCGGCCCCCTCCTTAACCGTCTACTAGAACCCTCAGGCCCTCTTGAT
ATTTTAACCGGATATCACTTATTTCGTCAGAATCCCAAGGCAGGTCAGTTGCGCGGTCTTGAGGTCAAGATGCTTGAACGGTT
ATACGATGCTAATATTTACAATATATTGTCTCGGCTGCGACCTGAAAAAGTTCGCAACAAGGCTATTGAGCTATACTGGGTTT
TCCGAGCTATCCATATTTGTCATGCTCCTTTAGTTTTAGATATTGTACGATATGAGGAACCGGACTTTGCTGAACTGGCCTTT
ATTTGTGCTGCTTACTTTGGTGAACCTCAGGTAATGTATTTGCTCTACAAATATATGCCTCTGACCCGCGCAGTTCTTACGGA
TGCCATCCGGATAAGTCTTGAGAGTAACAACCAGGTAGGGATTTGCTATGCTTACTTGATGGGAGGCAGCCTCAAGGGACTAG
TCTCCGCCCCACTGCGTAAACGTCTGCGCGCCAAACTACGCTCACAGCGCAAAAAGAAAGACGTTCTTTCACCCCACGACTTC
TTACTGCTGCTCCAGTAA
Mkuzi 1979 DP148R (AY261362.1:185751-186511)
SEQ ID No. 298
ATGCAAAATAAAATCCCAAATTTTAACCTTTTCTTTTTTTTTCTATACAGGATGTTAGAAATAGTATTGGCAACGCTGCTAGG
CGACCTGCAGCGGCTCCGGGTTCTTACCCCTCAGCAGCGGGCGGTTGCCTTCTTTCGAGCCAATACTAAGGAGCTAGAGGACT
TCTTATGCTCAGATGGGCAGTCTGAGGAGATACTATCTGGCCCCCTTCTTAACCGTCTACTAGAACCCTCAGGCCCTCTTGAT
ATTTTAACTGGATATCACCTATTTCGTCAGAACCCCAAGGCAGGTCAGTTACGCGGCCTTGAGGTCAAGATGCTTGAACGGTT
ATACGATGCTAATATTTACAATATATTGTCTCGGCTGCGACCTGAAAAAGTTCGCAACAAGGCTATTGAGCTTTACTGGGTTT
TTCGAGCTATCCATATTTGTCATGCTCCTTTAGTTTTAGATATTGTACGATATGAGGAACCGGACTTTGCTGAACTGGCCTTT
ATTTGTGCTGCTTACTTTGGTGAACCTCAGGTAATGTATTTGCTCTACAAATATATGCCTCTGACCCGCGCAGTTCTTACGGA
TGCCATCCGGATAAGTCTTGAGAGTAACAACCAGGTAGGGATTTGCTATGCTTACTTGATGGGAGGCAGCCTCAAGGGACTAG
TCTCCGCCCCACTGCGTAAACGTCTGTGCGCCAAACTACGCTCGCAGCGCAAAAAGAAGGACGTTCTTTCACCCCACGACTTC
TTACTGCTGCTCCAGTAA
Ken05/Tk1 DP148R (NC_044945.1:186074-186847)
SEQ ID No. 299
ATGCAAAATAAAATCCCAAATTTTAACCTTTTCTTTTTTTTTCTATACAAGATGTTAGAAATAGTATTGGCAACGCTGCTAGG
TGATCTGCAGAAACTTAAAGATCTTACACCTATGCAGCGGGCTGTGGCTTTCTTTCGAGCCAACACTAAAGAGCTAGAGGACT
TCCTCTGCCCCGATGGGCAGTCTGAGGAGTTACTCCCTGGACTTCTCCTTAACCGTTTATTAGAACCTTCAGGTCCTATTGAC
ATTTTAACCGGTTACCACCTATTTCGTGAGAATCCGAAGGCAGGTCGGCTGCGTGGCCTTGAGGTCAAGCTGCTTGAACGGTT
ATATGATGCTAACATCTACAATATATTGGCCCAGCTACGGCCTGAGTTGGTTCGCAATAAGGCTGTTGAGTTATATTGGCTCT
TTCGGGCTATTTTGATGTGTCATGGTCCCTTAGTTTTGGAGATTGTACGACATGAGACAATGGATTTTGCAGAATTAGCCTTT
ATCTGTGCTGCTTACTTTAGTGAACCTCAGGTAATGTACGCTATTTATAAATTTATACCTATCTCTTGCGCAGTCCTTGCTGA
TGCCATTCAGATGTGTCTTGAGAGTAACAGCGAGGCGGGGATTTGCTATGCTTACCTAATGGGGGGTAGCCTCAAGGGCAAGG
TGCCTGGCGCGCTGCGCAAACGTCTGCGTGCCAGTCCACTTCGGCAAGAGCGCAAAAAGAAAAACGTTCTTCCACCCCATGAA
TTCCTACTCATGCTTCATGGGATTTAA
Malawi Lil-20/1 (1983) DP148R (AY261361.1:183573-184346)
SEQ ID No. 300
ATGTTAGAAATAGTATTGGCAACGCTGCTAGGTGATCTGCAGAAGCTTAGGGATCTTACACCTATGCAGCGGGCTGTGGCTTT
CTTTCGAGTCAACACTAAAGAGCTAGAGGACTTCCTCTACCCCGATGGGCAGTCTGAGGAGTTGCTCCCTGGACTTCTCCTTA
ACCGTTTACTAGAACCTTCAGGCCCTATTGACATTTTAACCGGTTACCACCTATTTCGTGAGAACCCAAAGGCAGGTCGGCTG
CGTGGCCTTGAGGTTAAGCTGCTTGAACGGTTATATGATGCTAACATCTACAATATGTTGGCCCAAATACGACCTGAGTTGGT
TCGTATCAAGGCTATTGAGTTATATTGGCTCTTTCGGGCTATTTTAATGTGTCATAGTCCCTTAGTTTTGGAGATTGTACGAC
ATGAGACAATGGATTTTGCAGAATTAGCCTTTATCTGTGCTGCTTACTTTAGTGAACCTCAGGTAATGTACGCTCTTTATAAA
TTTATACCTATTTCTCGCGCAGTCCTTGCTGATGCCATCGAGATGTCTCTTGAGAGCAACAGCGAGACGGGGATTTGCTATGC
CTACCTAATGGGGGGTAGCCTCAAGGGCAAGGTGCCCGGCCCGCTGCGCAAACGTCTGCGTGCCAGTCCACTTCGGCAAGAGC
GCAAAAAGAAAAACGTCCTTCCGCCCCATGAATTTCTACTCATGCTCCATGGGATTTAA

[0306] The amino acid sequences of DP148R proteins from different ASFV strains is depicted below as SEQ ID Nos 11 to 19 and 301 to 305:

Benin 97/1 DP148R protein
SEQ ID No. 11
MQNKIPNFNLFFFFLYRMLEIVLATLLGDLQRLRVLTPQQRAVAFFRANTKELEDELRSDGQSEEILSGPLLNRLLEPSCPLD
ILTGYHLFRQNPKAGQLRGLEVKMLERLYDANIYNILSRLRPKKVRNKAIELYWVFRAIHICHAPLVLDIVRYEEPDFAELAF
ICAAYFGEPQVMYLLYKYMPLTRAVLTDAIQISLESNNQVGICYAYLMGGSLKGLVSAPLRKRLRAKLRSQRKKKDVLSPHDF
LLLLQ
Warthog DP148R protein: 181103 to 181549
SEQ ID No. 12
MLEIVLATLLGDLQRLRVLTPQQRAVAFFRANTKELEDFLCSDGQSEEILSGPLLNRLLEPSGPLDILTGYHLFRQNPKAGQV
RGLEVKMLERLYDANIYNILSRLRPEKVRNKAVELYWVFRAINMCHAPLVLDIVRYEEPDFAELAFICAAYFGEPQVMYLLYK
YMPLTRAVLTDAIQISLESNSQVGICYAYLMGGSLKGLVRAPLRKRLRAKLRSQRKKKDVLPPHDFLLLLQ
Kenya 1950 DP148R protein: 189417 to 189872
SEQ ID No. 13
MQNKIPNFNLFFFFLYKMLEIVLATLLGDLQKLKDLTPPQRAVAFFRANTKELEDFLYPDGQSEELLPGLLLNRLLEPSGSID
ILTGYHLFRENPKAGRLRGLEVKMLERLYDANIYNMLARLRPELVRDKAIELYWLFRAILMCHSPLVLEIVRHETMDFAETAF
ICAAYFSEPQVMYALYKFIPISRAVLADAIQMCLESNSEAGICYAYLMGGSLKGKVPGSLRKRLRASPLRQERKKKNVLPPHE
FLLMLHGI
Malawi LIL20/1 DP148R protein: 183687 to 184346
SEQ ID No. 14
MLEIVLATLLGDLQKLRDLTPMQRAVAFFRVNTKELEDFLYPDGQSEELLPGLLLNRLLEPSGPIDILTGYHLFRENPKAGRL
RGLEVKLLERLYDANIYNMLAQIRPELVRIKAIELYWLFRAILMCHSPLVLEIVRHETMDFAELAFICAAYFSEPQVMYALYK
FIPISRAVLADAIEMSLESNSETGICYAYLMGGSLKGKVPGPLRKRLRASPLRQERKKKNVLPPHEFLLMLHGI
Mkuzi DP148R protein: 185751 to 186515
SEQ ID No. 15
MQNKIPNFNLFFFFLYRMLEIVLATLLGDLQRLRVLTPQQRAVAFFRANTKELEDFLCSDGQSEEILSGPLLNRLLEPSGPLD
ILTGYHLFRQNPKAGQLRGLEVKMLERLYDANIYNILSRLRPEKVRNKAIELYWVFRAIHICHAPLVLDIVRYEEPDFAELAF
ICAAYFGEPQVMYLLYKYMPLTRAVLTDAIRISLESNNQVGICYAYLMGGSLKGLVSAPLRKRLCAKLRSQRKKKDVLSPHDF
LLLLQ
Pretorisuskop DP148R protein: 185416 to 185862
SEQ ID No. 16
MLEIVLATLLGDLQRLRVLTPQQRAVAFFRANTKEVEDFLCSDGQSEEVLSGPLLNRLLEPSGPLDILTGYHLFRQNPKAGQV
RGLEVKMLERLYDANIYNILSRLRPEKVRNKAVELYWVFRAINMCHAPLVLDIVRYEEPDFAELAFICAAYFGEPQVMYLLYK
YMPLSRAVLTDAIQISLESNSQVGICYAYLMGGSLKGLVRAPLRKRLRAKLRSQRKKKDVLPPHDFLLLLQ
Tengani62 DP148R protein: 180112 to 180558
SEQ ID No. 17
MLEIVLATLLGDLQRLRVLTPQQRAVAFFRANTKELEDFLCPDGQSEEVLSGSLLNRLLEPSGPLDILTGYHLFRQNPKAGQL
RGLEVKMLERLYDANIYNILSRLRPEKVRNKAVELYWVFRAINMCHAPLVLDIVRNEELDFAELAFICAAYFGEPQVMYLLYK
YMPLTRAVLTDAIQISLESNSQVGICYAYLMGGSLKGLVRAPLRKRLRAKLRSQRKKKDVLPPHDFLLLLQ
Warmbaths DP148R protein: 184606 to 185052
SEQ ID No. 18
MQNKIPNFNLFFFFLYRMLEIVLATLLGDLQRLRVLTPQQRAVAFFRANTKELEDFLCSDGQSEEILSGPLLNRLLEPSGPLD
ILTGYHLFRQNPKAGQLRGLEVKMLERLYDANIYNILSRLRPEKVRNKAIELYWVFRAIHICHAPLVLDIVRYEEPDFAELAF
ICAAYFGEPQVMYLLYKYMPLTRAVLTDAIRISLESNNQVGICYAYLMGGSLKGLVSAPLRKRLRAKLRSQRKKKDVLSPHDF
LLLLQ
OURT88/3 DP148R protein: 169146 to 169592
SEQ ID No. 19
MQNKIPNFNLFFFFLYRMLEIVLATLLGDLQRLRVLTPQQRAVAFFRANTKELEDFLRSDGQSEEILSGPPP
China/2018/Anhui DP148R protein
SEQ ID No. 301
MLEIVLATLLGDLQRLRVLTPQQRAVAFFRANTKELEDFLCSDGQSEEVLSGPLLNRLLEPSGPLDILTGYHLFRQNPKAGQL
RGLEVKMLERLYDANIYNILSRLRPEKVRNKAIELYWVFRAIHICHAPLVLDIVRYEEPDFAELAFICAAYFGEPQVMYLLYK
YMPLTRAVLTDAIRISLESNNQVGICYAYLMGGSLKGLVSAPLRKRLRAKLRSQRKKKDVLSPHDFLLLLQ
Georgia2007/1 DP148R protein
SEQ ID No. 302
MLEIVLATLLGDLQRLRVLTPQQRAVAFFRANTKELEDFLCSDGQSEEVLSGPLLNRLLEPSGPLDILTGYHLFRQNPKAGQL
RGLEVKMLERLYDANIYNILSRLRPEKVRNKAIELYWVFRAIHICHAPLVLDIVRYEEPDFAELAFICAAYFGEPQVMYLLYK
YMPLTRAVLTDAIRISLESNNQVGICYAYLMGGSLKGLVSAPLRKRLRAKLRSQRKKKDVLSPHDFLLLLQ
Ken05/Tk1 DP148R protein
SEQ ID No. 303
MQNKIPNFNLFFFFLYKMLEIVLATLLGDLQKLKDLTPMQRAVAFFRANTKELEDFLCPDGQSEELLPGLLLNRLLEPSGPID
ILTGYHLFRENPKAGRLRGLEVKLLERLYDANIYNILAQLRPELVRNKAVELYWLFRAILMCHGPLVLEIVRHETMDFAELAF
ICAAYFSEPQVMYAIYKFIPISCAVLADAIQMCLESNSEAGICYAYLMGGSLKGKVPGALRKRLRASPLRQERKKKNVLPPHE
FLLMLHGI
Ken06 DP148R protein
SEQ ID No. 304
MQNKIPNFNLFFFFLYKMLEIVLATLLGDLQQLKDLTPKQRAVAFFRANTKELEDFLYPDGQTEELLPGFLLNHLLEPSGPIE
ILTGYHLFRQNPKAGRLRGLEVKMLERLYDANIYNMLARLRPELVRDKAVELYWLFRAILICHGPLVLEIVRHETLDFAETAF
ICAAYFSEPQVMYALYNFIPPTHAVLADAIQMCLESNSEAGICYVYLMGGNLKGKVPGSLRKRLRASPLRQERKKKNVLPPHE
FLLLLHGI
L60 DP148R protein
SEQ ID No. 305
MQNKIPNFNLFFFFLYRMLEIVLATLLGDLQRLRVLTPQQRAVAFFRANTKELEDFLRSDGQSEEILSGPLLNRLLEPSCPLD
ILTGYHLFRQNPKAGQLRGLEVKMLERLYDANIYNILSRLRPEKVRNKAIELYWVFRAIHICHAPLVLDIVRYEEPDFAELAF
ICAAYFGEPQVMYLLYKYMPLTRAVLTDAIQISLESNNQVGICYAYLMGGSLKGLVSAPLRKRLRAKLRSQRKKKDVLSPHDF
LLLLQ

### Haemadsorption

[0307] Haemadsorption is the phenomenon whereby cells infected with ASFV adsorb erythrocytes (red blood cells) on their surface. The degree of haemadsorption induced by an ASFV may be measured using a haemadsorption (HAD) assay such as described herein (see for example Examples 1 and 3). For example, cells (such as Vero cells or porcine bone marrow cells) may be transfected with a protein or infected with an ASFV, then red blood cells added and the degree of haemadsorption detected by imaging. In this way, different proteins and viruses can be tested for their effect on haemadsorption.

[0308] EP402R and EP153R are involved in mediating haemadsorption of ASFV-infected cells.

[0309] In an embodiment the invention provides an attenuated ASF virus wherein the ability of the ASF virus to induce haemadsorption is reduced compared to a corresponding ASF virus in which expression and/or activity of the EP153R and EP402R genes is not disrupted. In an embodiment the invention provides an attenuated African Swine Fever (ASF) virus in which the expression and/or activity of the genes EP153R and EP402R is disrupted;

[0310] which comprises a functional version of one or more of the following genes:
[0311] multigene family (MGF) 110 3L, 6L, 7L, 8L, 10L, 11L and 12L,
[0312] MGF 360 5L, 6L, 7L, 10L, 11L, 12L, 13L, 14L, 20R, 21R and 22R, and
[0313] MGF 505 1R, 2R and 6R;
[0314] and wherein the ability of the ASF virus to induce haemadsorption is reduced compared to a corresponding ASF virus in which the expression and/or activity of the EP153R gene and/or the EP402R gene is not disrupted.

[0315] The invention also provides an attenuated ASF virus in which the expression and/or activity of the genes EP153R and EP402R is disrupted;

[0316] which comprises a functional version of one or more of the following genes:
[0317] multigene family (MGF) 110 11L and 12L,
[0318] MGF 360 6L, 10L, 11L, 12L, 13L, and 14L, and
[0319] MGF 505 1R and 2R;
[0320] and wherein the ability of the ASF virus to induce haemadsorption is reduced compared to a corresponding ASF virus in which the expression and/or activity of the EP153R gene and/or the EP402R gene is not disrupted.

[0321] The invention also provides an attenuated ASF virus in which the expression and/or activity of the genes EP153R and EP402R is disrupted;

[0322] which comprises a functional version of one or more of the following genes:
[0323] multigene family (MGF) 110 5L, 6L, 8L and 12L,
[0324] MGF 360 6L, 10L, 11L, 12L, 13L, 14L and 21R, and
[0325] MGF 505 1R and 2R;
[0326] and wherein the ability of the ASF virus to induce haemadsorption is reduced compared to a corresponding ASF virus in which the expression and/or activity of the EP153R gene and/or the EP402R gene is not disrupted.

[0327] In another aspect the invention provides an ASF virus comprising the EP402R protein of the invention and/or the polynucleotide of the invention wherein the ability of the ASF virus to induce haemadsorption is reduced compared to a corresponding ASF virus which does not comprise the EP402R protein of the invention and/or the polynucleotide of the invention.

[0328] In an embodiment of the attenuated ASF virus of the invention, the ability of the EP153R gene and/or the EP402R gene to mediate haemadsorption may be disrupted. In an embodiment, the ability of the EP153R gene to mediate haemadsorption may be disrupted. In an embodiment, the ability of the EP402R gene to mediate haemadsorption may be disrupted.

[0329] Reducing haemadsorption or disrupting the ability to mediate haemadsorption means that cells infected with the ASFV of the invention adsorb fewer red blood cells to their surface than cells infected with a wild-type ASFV or with an ASF virus corresponding to, or essentially corresponding to, the ASFV of the invention in which expression and/or activity of the EP153R and EP402R genes has not been disrupted or which does not comprise the EP402R protein of the invention and/or the polynucleotide of the invention. Reducing haemadsorption or disrupting the ability to mediate haemadsorption also means that cells transfected to express a mutant, non-functional EP153R or EP402R protein adsorb fewer red blood cells to their surface than cells transfected with a wild-type EP153R or EP402R protein. The number of red blood cells adsorbed to the surface of the infected/transfected cells may be decreased by at least 50, 60, 70, 80 or 90%. In an embodiment, haemadsorption is abolished i.e. no red blood cells adsorb to the surface of cells infected with the attenuated ASFV of the invention or transfected with a mutant, non-functional EP153R or EP402R protein.

### Gene Expression and Activity

[0330] In an embodiment the ASF virus of the present invention has disrupted expression and/or activity of the genes EP153R and EP402R. In another embodiment the ASF virus of the present invention has disrupted expression and/or activity of the genes EP153R, EP402R and K145R. These genes may be referred to herein as the “disrupted genes”.

[0331] In an embodiment the invention provides an ASFV in which expression of the genes EP153R and EP402R is disrupted. In an embodiment the invention provides an ASFV in which expression of the genes EP153R, EP402R and K145R is disrupted. Suitably expression of the EP153R gene is disrupted. Suitably expression of the EP402R gene is disrupted. Suitably expression of the K145R gene is disrupted. In an embodiment the invention provides an ASFV in which activity of the genes EP153R and EP402R is disrupted.

[0332] The term “expression” with respect to a gene refers to the ability of the ASF virus to produce the product of the gene, such as RNA and/or protein. Disruption of expression of a gene means that production of the gene product is decreased. Expression of the gene may be decreased by at least 50%, at least 60%, at least 70%, at least 80%, at least 90% and/or at least 95%. Expression of the gene may be decreased to the extent that production of the gene product, such as RNA and/or protein, is entirely abolished (i.e. the gene product is not produced at all). Disruption of gene expression decreases expression of the gene relative to the expression of the gene when it is not disrupted. For example, a mutated gene may have decreased expression in comparison to a wild-type version of the gene.

[0333] A gene the expression of which is disrupted may not be fully transcribed and translated. Transcription of the gene may be decreased by at least 50%, at least 60%, at least 70%, at least 80%, at least 90% and/or at least 95%. Transcription of the gene may be abolished (i.e. the gene may not be transcribed). Translation of the gene may be decreased by at least 50%, at least 60%, at least 70%, at least 80%, at least 90% and/or at least 95%. Translation of the gene may be abolished. The gene may be transcribed but not translated. The gene may be transcribed and translated but the protein too rapidly degraded to carry out its function. The gene may be transcribed and translated but the protein may be non-functional.

[0334] Gene expression may be measured by techniques known in the art. For example, the amount of mRNA transcribed from a gene may be quantified, such as by using quantitative polymerase chain reaction (qPCR). Alternatively or additionally, the amount of protein may be quantified, such as by using Western blotting or mass spectrometry.

[0335] The term “activity” with respect to a gene refers to the ability of the gene to carry out its functions. Different genes have different activities i.e. different functions they fulfil. A given gene may have multiple activities; disruption of gene activity means disruption of one or more of those activities. One or more activities of the gene may be disrupted whilst one or more other activities are not disrupted. Disruption of gene activity decreases the activity of the gene relative to the activity of the gene when it is not disrupted. For example, a mutated gene may have decreased activity in comparison to a wild-type version of the gene. Gene activity may be decreased to the extent that gene activity is entirely abolished.

[0336] The ASFV according to the present invention may comprise a non-functional version of the disrupted genes.

[0337] Disruption of expression of a gene may also disrupt activity of that gene as the decreased amount of gene product means the gene cannot as effectively carry out one or more of its activities.

[0338] In an embodiment the attenuated ASF virus of the invention comprises mutations that disrupt the expression and/or activity of the genes EP153R and EP402R.

[0339] Gene expression and/or activity may be disrupted by disrupting transcription of the gene into mRNA i.e. by decreasing gene transcription, such as completely abolishing gene transcription. Gene expression and/or activity may be disrupted by disrupting translation of mRNA into protein. In an embodiment the attenuated ASF virus comprises mutations that decrease transcription and/or translation of the genes. In an embodiment the attenuated ASF virus comprises mutations that cause the genes to not be transcribed and/or translated (i.e. complete abolition of transcription and/or translation).

[0340] Gene expression and/or activity may be disrupted by mutating a non-coding sequence associated with the gene, such as a promoter. In an embodiment the attenuated ASF virus comprises mutations in promoters of one or more of the disrupted genes.

[0341] Gene expression and/or activity may be disrupted by mutating a coding sequence of one or more of the disrupted genes.

### Functional Version of a Gene

[0342] The attenuated ASFV of the invention comprises a functional version of one or more of the following genes:
[0343] multigene family (MGF) 110 3L, 6L, 7L, 8L, 10L, 11L and 12L,
[0344] MGF 360 5L, 6L, 7L, 10L, 11L, 12L, 13L, 14L, 20R, 21R and 22R, and
[0345] MGF 505 1R, 2R and 6R.

[0346] In some embodiments the attenuated ASFV of the invention may comprise a functional version of one or more of the following genes: MGF 110 3L, 6L, 7L, 8L, 10L, 11L and 12L; MGF 360 5L, 6L, 7L, 10L, 11L, 12L, 13L, 14L, 20R, 21R and 22R; and MGF 505 1R, 2R and 6R. Suitably, the attenuated ASFV comprises functional versions of two or more, such as three or more, four or more, five or more, six or more, seven or more, eight or more, nine or more, ten or more, eleven or more, twelve or more, thirteen or more, fourteen or more, fifteen or more, sixteen or more, seventeen or more, eighteen or more, nineteen or more, twenty or more, twenty one, or twenty two of the following genes: MGF 110 3L, 6L, 7L, 8L, 10L, 11L and 12L; MGF 360 5L, 6L, 7L, 10L, 11L, 12L, 13L, 14L, 20R, 21R and 22R; and MGF 505 1R, 2R and 6R. In an embodiment the attenuated ASFV comprises functional versions of all of the following genes: MGF 110 3L, 6L, 7L, 8L, 10L, 11L and 12L; MGF 360 5L, 6L, 7L, 10L, 11L, 12L, 13L, 14L, 20R, 21R and 22R; and MGF 505 1R, 2R and 6R. Suitably the attenuated ASF virus of the invention comprises functional versions of all ASF virus genes other than EP153R and EP402R. Suitably the attenuated ASF virus of the invention comprises functional versions of all ASF virus genes other than EP153R, EP402R and K145R.

[0347] The expression “functional version” of a gene refers to a gene the expression and activity of which have not been disrupted. A functional version of a gene may not be mutated in a manner that disrupts gene expression or gene activity. A functional version of a gene may not comprise any mutations. The coding sequence of a functional version of a gene may be complete and uninterrupted. A functional version of a gene may be fully transcribed and translated. A functional version of a gene may comprise the full coding sequence.

[0348] A functional version of a gene may correspond to the gene in a wild-type ASFV isolate. A functional version of a gene may correspond to the gene in a virulent ASFV strain. The sequence of a functional version of a gene may be identical to the sequence of the gene in a wild-type ASFV isolate or virulent ASFV strain. The sequence of a functional version of a gene may be identical to the sequence of the gene in the wild-type ASFV isolate from which the attenuated ASFV of the invention is derived. A functional version of a gene may be a natural variant of the gene in a wild-type ASFV isolate.

[0349] A functional version of a gene may comprise mutations. However, the mutations should not disrupt the expression or activity of the gene. In other words, the mutations should not affect the function of the gene. A functional version of a gene may comprise one or more synonymous mutations (i.e. mutations which do not alter the amino acid sequence of the protein the gene encodes). A functional version of a gene may comprise one or more silent mutations, which may be synonymous or non-synonymous. A functional version of a gene may comprise deletions that do not disrupt the expression or activity of the gene. A functional version of a gene may comprise one or more single nucleotide polymorphisms (SNPs) that do not disrupt the expression or activity of the gene.

### Mutations

[0350] Gene expression and/or activity are disrupted by mutating the ASFV genome i.e. by changing the nucleotide sequence of the ASFV genome. A “mutation” means a change in the nucleotide sequence of the ASFV genome relative to a known ASFV genotype. Mutations include changing one or more nucleotides to different nucleotides (i.e. substitution), adding nucleotides (i.e. insertion), removing nucleotides (i.e. deletion) and/or a combination of these. In an embodiment the ASF virus of the invention comprises one or more mutations that disrupt the expression and/or activity of the genes EP153R and EP402R. In an embodiment the ASF virus of the invention comprises one or more mutations that disrupt the expression of the K145R gene.

[0351] Mutations that disrupt gene expression and/or activity may be in non-coding sequence of the ASFV genome and/or in coding sequence of the ASFV genome. The attenuated ASF virus of the invention may comprise one or more mutations in a non-coding region that disrupt the expression and/or activity of the EP153R gene and/or one or more mutations in a non-coding region that disrupt the expression and/or activity of the EP402R gene. The ASF virus of the invention may comprise one or more mutations in a non-coding region that disrupt the expression and/or activity of the K145R gene.

[0352] The ASF virus of the invention may comprise one or more mutations in a coding region of the EP153R gene that disrupt the expression and/or activity of the EP153R gene and/or one or more mutations in a coding region of the EP402R gene that disrupt the expression and/or activity of the EP402R gene. The attenuated ASF virus of the invention may comprise one or more mutations in a coding region of the K145R gene that disrupt the expression of the K145R gene.

### Deletions

[0353] In the ASFV of the invention, expression and/or activity of genes may be disrupted by deletion. In other words, expression and/or activity of a gene may be disrupted by a mutation that is a deletion. An ASFV of the invention may be made to lack a functional version of a gene by deletion. In other words, the mutation that causes the ASFV to lack a functional version of a gene may be a deletion.

[0354] “Deletion” means removal of part of the ASFV genome nucleotide sequence. The deletion may be continuous, or may comprise deletion of a plurality of sections of sequence. Deletion may disrupt gene expression and/or activity in any of the ways described herein. Deletion may cause the ASFV to lack a functional version of the gene in any of the ways described herein.

[0355] Deletion may alter the gene product that is produced. Deletion may cause the gene to not be transcribed and/or translated. Deletion may disrupt transcription of the gene into mRNA. For example, deleting a promoter of a gene would disrupt transcription. Deletion may disrupt translation of mRNA into protein. For example, deleting a start codon would disrupt translation.

[0356] Gene expression and/or activity may be disrupted by deleting non-coding sequence associated with the gene, such as a promoter.

[0357] Gene expression and/or activity may be disrupted by deleting coding sequence of the gene. The ASFV may be made to lack a functional version of the gene by deleting coding sequence of the gene. The expression “deletion of a gene” (such as “partially deleted” or “completely deleted”) refers to deletion of a sufficient amount of coding sequence such that expression and/or activity of the gene is disrupted.

[0358] Deletion of coding sequence may be partial (i.e. part of the coding sequence is deleted). The deletion may, for example, remove at least 50, 60, 70, 80 or 90% of the coding sequence of the gene. The amount of coding sequence required to be deleted to disrupt gene expression and/or activity may be very small. For example, partial deletion of a gene may mean deletion of just the start codon (ATG) if this is sufficient to disrupt expression and/or activity of the gene. At the other extreme, the deletion may be complete, in which case 100% of the coding sequence of the gene is deleted (i.e. all of the coding sequence is absent when compared to the corresponding genome of a wild-type isolate). In other words, “completely deleted” means that all of the coding sequence of that gene has been deleted.

[0359] Partial and full deletions of a gene can be made using known techniques in the art, such as conditional targeting via Cre-LoxP and Flp-FRT systems, or by inducing a double strand break (DSB) and repair using engineered nucleases such as meganucleases, zinc finger nucleases (ZFNs), transcription-activator like effector nucleases (TALENs) and Cas in CRISPR-Cas systems. The DSB repair can be exploited to introduce a desired mutation by providing a vector comprising the desired mutated nucleotide sequence within a sequence that is homologous to the sequences flanking either side of the DSB. This results in the desired mutation being inserted at the site of the DSB. Nucleases such as those above can be engineered to induce DSB at a specific site within the genome. For example, chimeric meganucleases can be readily generated by combining known protein units to recognise a target recognition sequence within a gene or genomic region of interest. ZFNs can also be designed to target specific sequences, for example combining zinc-finger units with known specificities to bind specific regions of DNA. TALENs are artificial restriction enzymes designed by fusing a nuclease domain to DNA-binding TALE (transcription activator-like effector) domains. TALE domains are tandem arrays of amino acid repeats that recognise a single nucleotide and can be designed to target a specific region of DNA. CRISPR-Cas systems consist of a Cas (CRISPR-associated protein) nuclease and a CRISPR (clustered regularly interspaced short palindromic repeat) RNA sequence that guides the Cas protein to recognise and cleave a specific strand of DNA complementary to the CRISPR sequence. Single-stranded guide RNA (sgRNA) can therefore be designed to bind to a specific region of DNA and guide the Cas to introduce a DSB. Accordingly, provided the nucleotide (e.g. DNA or cDNA) sequence of a gene is known, a known nuclease system can be utilised to introduce a partial or full deletion to the gene.

[0360] Deletion of coding sequence may be continuous, or may comprise deletion of a plurality of sections of coding sequence. The deletion should remove a sufficient amount of coding sequence such that deletion disrupts the expression and/or activity of the gene i.e. a functional gene product, such as a protein, is no longer produced from the gene.

### Interruptions

[0361] The expression and/or activity of the genes may be disrupted by interruption of the gene. In other words, the mutation that disrupts expression and/or activity of a gene may be one that interrupts the gene.

[0362] In an embodiment of the ASFV of the present invention the genes EP153R, EP402R and K145R may each be interrupted. The EP153R gene may be interrupted. The EP402R gene may be interrupted. The K145R gene may be interrupted.

[0363] “Interruption” means the mutation alters the coding sequence of the gene such that a functional gene product, such as a protein, is no longer produced. The term “interruption” may be used herein to refer to a mutation that interrupts a gene. The mutation(s) should interrupt the coding sequence in a manner such that expression and/or activity of the gene is disrupted i.e. a functional gene product, such as a protein, is no longer produced from the gene.

[0364] Interruptions may encompass deletions (i.e. removal of one or more nucleotides) within the coding sequence of a gene, but also substitutions (i.e. replacement of one or more nucleotides with different nucleotides) and insertions (i.e. addition of one or more nucleotides) within the coding sequence of a gene.

[0365] The interruption may entirely abolish gene product production. For example, where the gene product is a protein, the interruption may render the mRNA nonsensical, causing the mRNA to be degraded and the protein to not be translated, thereby abolishing protein production. The interruption may alter the gene product that is produced. The interruption may cause the gene to not be transcribed and/or translated.

[0366] The interruption may be a point mutation (i.e. substitution, insertion or deletion of a single nucleotide). An interruption may be an insertion of one or more nucleotides. An interruption may be a deletion. A gene may comprise multiple mutations that lead to interruption of the gene.

[0367] The interruption may be a frame shift mutation, caused by insertion or deletion of nucleotides. A frame shift causes the codons downstream of the frame shift to be read as different amino acids. The protein produced may be non-functional.

[0368] The interruption may be mutation of a start codon. A start codon is typically ATG. Mutation of a start codon (e.g. point mutation of one, two or three of the nucleotides) means that translation will not start at that codon. Translation may begin at a subsequent start codon further downstream. If the subsequent start codon is in frame a version of the protein is produced that is N-terminally truncated and so may be non-functional. If the subsequent start codon is not in frame an entirely different or nonsense protein is produced, which would be non-functional. If there is no subsequent start codon, translation is entirely abolished and no protein is produced.

[0369] The interruption may be mutation of a stop codon (TAG, TAA or TGA). Mutation of a stop codon (also referred to as a nonstop mutation) causes continued translation of mRNA into a sequence that should not be translated. The resulting protein may be non-functional due to its excessive length.

### Amino Acid Changes

[0370] In embodiments of the ASF virus of the invention, the EP402R gene may comprise one or more mutations that change one or more amino acids in the ligand-binding domain of the EP402R protein. The amino acid changes in EP402R are described in detail elsewhere herein.

### Mutation Combinations in ASF Virus

[0371] The mutations that disrupt gene expression and/or activity described herein may be combined in an ASFV of the invention. In other words, the EP153R and EP402R genes in an ASFV of the invention may each be disrupted by the same type of mutation as any of the other genes or by a different type of mutation as any of the other genes. Furthermore, the K145R gene may be disrupted by the same type of mutation as any of the other genes or by a different type of mutation as any of the other genes.

[0372] For example, in an ASFV of the invention, EP153R may be disrupted by complete deletion, EP402R may be disrupted by an amino acid change in its ligand-binding domain and K145R may be disrupted by mutation of a promoter sequence. As an alternative example, EP153R may be disrupted by interruption and EP402R may be disrupted by complete deletion and K145R may be disrupted by partial deletion.

[0373] In an embodiment the invention provides an ASFV in which
[0374] the EP153R gene is completely deleted, and
[0375] the EP402R gene comprises a mutation that changes an amino acid at a position in
[0376] the EP402R protein which corresponds to Q96 of Georgia 2007/1 EP402R protein (SEQ ID No. 24) to R.

[0377] In an embodiment the invention provides an ASFV in which
[0378] the EP153R gene and the K145R gene are each completely deleted, and
[0379] the EP402R gene comprises a mutation that changes an amino acid at a position in
[0380] the EP402R protein which corresponds to Q96 of Georgia 2007/1 EP402R protein (SEQ ID No. 24) to R.

[0381] In an embodiment the invention provides an ASFV in which
[0382] the EP153R gene is completely deleted, and
[0383] the EP402R gene comprises a mutation that changes an amino acid at a position in
[0384] the EP402R protein equivalent to W99 of Georgia 2007/1 EP402R protein (SEQ ID No. 24) to D.

[0385] In an embodiment the invention provides an ASFV in which
[0386] the EP153R gene and the K145R gene are each completely deleted, and
[0387] the EP402R gene comprises a mutation that changes an amino acid at a position in
[0388] the EP402R protein equivalent to W99 of Georgia 2007/1 EP402R protein (SEQ ID No. 24) to D.

[0389] In an embodiment the invention provides an ASFV in which the EP153R gene and the K145R gene are each completely deleted, and which comprises an EP402R protein comprising the sequence of SEQ ID No. 33.

[0390] In an embodiment the invention provides an ASFV in which the EP153R gene, the EP402R gene and the K145R gene are each completely deleted.

[0391] In an embodiment the invention provides an ASFV wherein the ASFV genome is the same as that of the Georgia 2007/1 strain, except that
[0392] the EP153R gene and the K145R gene are each completely deleted, and
[0393] the EP402R gene comprises a mutation that changes Q96 of the EP402R protein to R.

[0394] In an embodiment the invention provides an ASFV in which the EP153R gene and the K145R gene are each completely deleted, and which comprises an EP402R protein comprising the sequence of SEQ ID No. 33, wherein the genome of the ASFV corresponds to that of the Georgia 2007/1 strain.

### Medical Use, Vaccine and Pharmaceutical Composition

[0395] In present invention provides an ASF virus of the invention for use in treating and/or preventing a disease in a subject. The invention also provides use of an ASF virus of the invention for manufacture of a medicament for treating and/or preventing disease in a subject. Suitably the disease is African Swine Fever.

[0396] The present invention also provides a vaccine comprising an attenuated ASF virus of the invention.

[0397] The term “vaccine” as used herein refers to a preparation which, when administered to a subject, induces or stimulates a protective immune response. In some embodiments the vaccine of the invention induces a partially protective immune response. In some embodiments the vaccine reduces severity and/or duration of ASF symptoms but does not completely abolish ASF symptoms. A vaccine can render an organism immune to a particular disease, in the present case ASF. The vaccine of the present invention thus induces an immune response in a subject which is protective against subsequent ASF virus challenge. A vaccine comprising an attenuated ASFV of the invention may be capable of inducing a cross-protective immune response against a plurality of ASF virus genotypes. In an embodiment a vaccine comprising an attenuated ASFV of the invention of a single genotype may be capable of inducing a cross-protective immune response against a plurality of ASF virus genotypes.

[0398] The vaccine may comprise a plurality of attenuated ASF viruses. The plurality of attenuated ASF viruses may correspond to a plurality of different isolates, for example, different isolates of high or unknown virulence. Such a vaccine may be capable of inducing a cross-protective immune response against a plurality of ASF virus genotypes.

[0399] The vaccine may be useful in preventing African Swine Fever. Accordingly, the invention provides a vaccine of the invention for use in treating and/or preventing African Swine Fever in a subject.

[0400] The present invention also provides a pharmaceutical composition which comprises one or more attenuated ASF virus(es) of the invention. The pharmaceutical composition may be used for treating African Swine Fever.

[0401] The vaccine or pharmaceutical composition may comprise one or more attenuated ASF virus(es) of the invention and optionally one or more adjuvants, excipients, carriers and diluents. The choice of pharmaceutical excipient, carrier or diluent can be selected with regard to the intended route of administration and standard pharmaceutical practice. The pharmaceutical compositions may comprise as (or in addition to) the carrier, excipient or diluent, any suitable binder(s), lubricant(s), suspending agent(s), coating agent(s), solubilising agent(s) and other carrier agents. The pharmaceutical compositions typically should be sterile and stable under the conditions of manufacture and storage. Formulations for parenteral administration include, but are not limited to, suspensions, solutions, emulsions in oily or aqueous vehicles, pastes, and implantable sustained-release or biodegradable formulations. Sterile injectable formulations may be prepared using a non-toxic parenterally acceptable diluent or solvent. A pharmaceutical composition of the present invention may include pharmaceutically acceptable dispersing agents, wetting agents, suspending agents, isotonic agents, coatings, antibacterial and antifungal agents, carriers, excipients, salts, or stabilizers which are nontoxic to the subjects at the dosages and concentrations employed. Preferably, such a composition can further comprise a pharmaceutically acceptable carrier or excipient for use in the treatment of disease that that is compatible with a given method and/or site of administration, for instance for parenteral (e.g. sub-cutaneous, intradermal, or intravenous injection) or intrathecal administration.

[0402] The vaccine or pharmaceutical composition may comprise one or more attenuated ASF virus(es) of the invention in an effective amount.

[0403] In an embodiment the invention provides an attenuated ASF virus of the invention which when administered to a subject induces an immune response which is protective against subsequent challenge with virulent ASF virus. In an embodiment the invention provides an attenuated ASF virus of the invention which when administered to a subject induces an immune response which is protective against subsequent challenge with virulent ASF virus of a different genotype to the attenuated ASF virus of the vaccine. In an embodiment the invention provides an attenuated ASF virus of the invention which when administered to a subject induces an immune response which is protective against subsequent challenge with virulent ASF virus of any genotype. Accordingly, the invention provides a vaccine comprising an attenuated ASF virus for use in treating and/or preventing African Swine Fever wherein the African Swine Fever is caused by an ASF virus of a different genotype to the ASF virus of the vaccine. In an embodiment the invention provides a vaccine comprising an attenuated ASF virus for use in treating and/or preventing African Swine Fever wherein the African Swine Fever is caused by an ASF virus of any genotype. In an embodiment the ASF virus of the vaccine corresponds to genotype II, such as Georgia 2007/1 strain and the vaccine is protective against infection with genotype I, II, III, IV, V, VI, VII, VIII, IX, X and/or XIV. In an embodiment the ASF virus of the vaccine corresponds to genotype II, such as Georgia 2007/1 strain and the vaccine is protective against infection with genotype I, IX, X, XIV, and/or VIII. In an embodiment the ASF virus of the vaccine corresponds to genotype II, such as Georgia 2007/1 strain and the vaccine is protective against infection with genotype I, IX, and/or X.

### Methods of Prevention/Treatment

[0404] The present invention also provides a method of preventing and/or treating ASF in a subject by administration to the subject of an effective amount of an attenuated virus, vaccine, or pharmaceutical composition of the invention.

[0405] The term “preventing” is intended to refer to averting, delaying, impeding or hindering the contraction of ASF. The vaccine may, for example, prevent or reduce the likelihood of an infectious ASFV entering a cell. The vaccine may reduce the severity and/or duration of ASF symptoms. The vaccine may completely abolish ASF symptoms.

[0406] The term “treating” is intended to refer to reducing or alleviating at least one symptom of an existing ASF infection.

[0407] The subject may be any animal which is susceptible to ASF infection. ASF susceptible animals include domestic pigs, warthogs, bush pigs and ticks.

[0408] The subject vaccinated according to the present invention may be a domestic pig.

[0409] Suitably, protective immunity as defined herein may be conferred to piglets who are fed colostrum from a vaccinated subject, such as a vaccinated mother.

### Administration

[0410] The vaccine of the invention may be administered by any convenient route, such as by intramuscular injection. Other suitable routes of administration include intranasal, oral, subcutaneous, transdermal and vaginal (e.g. during artificial insemination). In one embodiment, oral administration comprises adding the vaccine to animal feed or drinking water. In another embodiment, the vaccine may be added to bait for a wild animal, for example bait suitable for wild boar, wild pigs, bushpigs or warthogs.

[0411] The dose for pig immunisation may be from about 10³ to about 10⁶ HAD₅₀ or TCID₅₀ per pig. The dose for pig immunisation may be from about 10³ to about 10₆ TCID₅₀ per pig. The dose for pig immunisation may be less than 10⁴ HAD₅₀ or TCID₅₀ per pig. For example the dose may be between 10²-10³ HAD₅₀ or TCID₅₀. The dose may be about 10² HAD₅₀ or TCID₅₀ per pig. The dose may be determined by a veterinary practitioner within the scope of sound veterinary judgment.

[0412] The vaccine may be administered following a prime-boost regime. For example, after the first inoculation, the subjects may receive a second boosting administration some time (such as about 7, 14, 21 or 28 days) later. Typically the boosting administration is at a higher dose than the priming administration. The boosting dose may be from about 10³ to about 10⁶ HAD₅₀ or TCID₅₀ per pig. The boosting dose may be from about 10³ to about 10⁶ TCID₅₀ per pig.

### Method for Preparing a Virus

[0413] The present invention also provides a method of producing an ASF virus of the invention, the method comprising changing one or more amino acid in the ligand-binding domain of the EP402R protein wherein the amino acid change disrupts ligand-binding of the EP402R protein.

[0414] The present invention also provides a method of reducing the ability of an ASF virus to induce haemadsorption, the method comprising changing one or more amino acid changes in the ligand-binding domain of the EP402R protein wherein the amino acid changes disrupt ligand-binding of the EP402R protein.

[0415] The amino acid changes in the ligand-binding domain of EP402R may be any of the amino acid changes described herein. Such amino acid changes may be made by mutating the ASFV genome as described herein.

[0416] In an embodiment, the method comprises changing one or more amino acid in the EP402R protein at a position which corresponds to Q96 and/or W99 of the Georgia 2007/1 EP402R protein (SEQ ID No. 24).

[0417] The invention also provides a method of attenuating an ASF virus which comprises disrupting the expression and/or activity of the EP153R and EP402R genes. Suitably the method comprises disrupting the ability of the EP153R gene and/or the EP402R gene to mediate haemadsorption.

[0418] Disruption of gene expression and/or activity may be achieved by mutating the ASFV genome in any of the ways described herein.

[0419] In an embodiment the method further comprises introducing a DIVA mutation into the ASF virus. Suitably the DIVA mutation disrupts expression of the K145R gene. Suitably the K145R is at least partially deleted, preferably completely deleted. Suitably the K145R gene is interrupted. Suitably the DIVA mutation disrupts expression of the B125R gene. Suitably the B125R is at least partially deleted, preferably completely deleted. Suitably the B125R gene is interrupted.

[0420] In an embodiment of the method of producing and/or attenuating an ASFV, the EP153R gene is at least partially deleted, preferably completely deleted. In an embodiment the EP153R gene is interrupted.

[0421] In an embodiment of the method of producing and/or attenuating an ASFV, the EP402R gene is at least partially deleted, preferably completely deleted. In an embodiment the EP402R gene is interrupted. Suitably the method comprises introducing one or more mutations in the EP402R gene that reduce surface expression of the EP402R protein compared to a corresponding ASF virus that does not comprise the one or more mutations. Suitably the method comprises introducing one or more mutations in the EP402R gene that disrupt ligand binding by the EP402R protein. Suitably the method comprises introducing one or more mutations in the EP402R gene that change one or more amino acids in the ligand-binding domain of the EP402R protein. Suitably the one or more amino acids are changed to different amino acids. Suitably, changing the amino acids to different amino acids directly inhibits the interaction between EP402R and its ligand by changing the binding surface on EP402R.

[0422] In an embodiment the method comprises changing an amino acid in the EP402R protein at a position which corresponds to Q96 and/or W99 of the Georgia 2007/1 EP402R protein (SEQ ID No. 24). Suitably the amino acid in the EP402R protein at a position which corresponds to Q96 of the Georgia 2007/1 EP402R protein (SEQ ID No. 24) is changed to R or to an amino acid that is a conservative replacement of R and/or an amino acid at a position which corresponds to W99 of the Georgia 2007/1 EP402R protein (SEQ ID No. 24) is changed to D or to an amino acid that is a conservative replacement of D. Suitably the amino acid at the position which corresponds to Q96 is changed to H, K or R and/or the amino acid at the position which corresponds to W99 is changed to D, E, N or Q. Suitably the amino acid at the position which corresponds to Q96 is changed to R and/or the amino acid at the position which corresponds to W99 is changed to D.

[0423] In an embodiment the invention provides a method of attenuating an ASF virus comprising completely deleting each of the EP153R and K145R genes, changing the amino acid at the position which corresponds to Q96 of the Georgia 2007/1 EP402R protein (SEQ ID No. 24) to R and/or changing the amino acid at the position which corresponds to W99 of the Georgia 2007/1 EP402R protein (SEQ ID No. 24) to D. In an embodiment the invention provides a method of attenuating an ASF virus comprising completely deleting each of the EP153R and K145R genes, and changing the amino acid at the position which corresponds to Q96 of the Georgia 2007/1 EP402R protein (SEQ ID No. 24) to R.

[0424] In an embodiment the method of producing and/or attenuating an ASF virus of the invention may be applied to an ASF virus of any genotype (i.e. an ASF virus of any of genotypes I to XXIV). In other words, an ASF virus of any genotype may be the subject of the modifications of the method of the invention. An ASF virus of any genotype may used in the method. In an embodiment the method of producing and/or attenuating an ASF virus of the invention may be applied to an ASF virus of genotype II. In an embodiment the method of producing and/or attenuating an ASF virus of the invention may be applied to an ASF virus of the Georgia 2007/1 strain.

[0425] In an embodiment the invention provides a method of attenuating an ASF virus of the Georgia 2007/1 strain comprising completely deleting each of the EP153R and K145R genes, changing Q96 of the Georgia 2007/1 EP402R protein (SEQ ID No. 24) to R and/or changing W99 of the Georgia 2007/1 EP402R protein (SEQ ID No. 24) to D. In an embodiment the invention provides a method of attenuating an ASF virus of the Georgia 2007/1 strain comprising completely deleting each of the EP153R and K145R genes, and changing Q96 of the Georgia 2007/1 EP402R protein (SEQ ID No. 24) to R.

[0426] Methods for mutation of viral genes are known in the art. In particular, methods for deletion of viral genes are known in the art. For example, homologous recombination may be used, in which a transfer vector is created in which the relevant gene(s) are missing and used to transfect virus-infected cells. Recombinant viruses expressing the new portion of sequence may then be selected. Similar procedures may be used in order to interrupt gene expression, for example by deletion of the ATG start codon.

[0427] In some embodiments, the method of attenuating an ASF virus may comprise retaining the function of one or more of the following genes: MGF 110 3L, 6L, 7L, 8L, 10L, 11L and 12L; MGF 360 5L, 6L, 7L, 10L, 11L, 12L, 13L, 14L, 20R, 21R and 22R; and MGF 505 1R, 2R and 6R. Suitably, the function of two or more, such as three or more, four or more, five or more, six or more, seven or more, eight or more, nine or more, ten or more, eleven or more, twelve or more, thirteen or more, fourteen or more, fifteen or more, sixteen or more, seventeen or more, eighteen or more, nineteen or more, twenty or more, twenty one, or twenty two of the following genes are retained: MGF 110 3L, 6L, 7L, 8L, 10L, 11L and 12L; MGF 360 5L, 6L, 7L, 10L, 11L, 12L, 13L, 14L, 20R, 21R and 22R; and MGF 505 1R, 2R and 6R. In an embodiment the method of attenuating an ASF virus may comprise retaining the function of all of the following genes: MGF 110 3L, 6L, 7L, 8L, 10L, 11L and 12L; MGF 360 5L, 6L, 7L, 10L, 11L, 12L, 13L, 14L, 20R, 21R and 22R; and MGF 505 1R, 2R and 6R.

[0428] “Retaining the function” of a gene means that expression and activity of the gene is not affected during the attenuation process. The resultant attenuated virus should express a functional version of the gene. Suitably, the genes the function of which is to be retained are unaltered by the method of attenuation. Suitably, the sequences of the genes the function of which is to be retained are unaltered by the method of attenuation.

[0429] This disclosure is not limited by the exemplary methods and materials disclosed herein, and any methods and materials similar or equivalent to those described herein can be used in the practice or testing of embodiments of this disclosure. Numeric ranges are inclusive of the numbers defining the range. Unless otherwise indicated, any nucleic acid sequences are written left to right in 5′ to 3′ orientation; amino acid sequences are written left to right in amino to carboxy orientation, respectively.

[0430] It must be noted that as used herein and in the appended claims, the singular forms “a”, “an”, and “the” include plural referents unless the context clearly dictates otherwise.

[0431] The terms “comprising”, “comprises” and “comprised of” as used herein are synonymous with “including”, “includes” or “containing”, “contains”, and are inclusive or open-ended and do not exclude additional, non-recited members, elements or method steps. The terms “comprising”, “comprises” and “comprised of” also include the term “consisting of”.

[0432] The publications discussed herein are provided solely for their disclosure prior to the filing date of the present application. Nothing herein is to be construed as an admission that such publications constitute prior art to the claims appended hereto.

### Further Aspects

[0433] The present invention also provides further aspects as defined in the following numbered paragraphs (paras).

[0434] 1. An attenuated African Swine Fever (ASF) virus in which the expression and/or activity of the genes EP153R and K145R is disrupted.

[0435] 2. An attenuated ASF virus according to para 1 in which the expression and/or activity of the EP402R is not disrupted.

[0436] 3. An attenuated ASF virus according para 1 or 2 which comprises a functional version of one or more of the following genes:
[0437] multigene family (MGF) 110 3L, 6L, 7L, 8L, 10L, 11L and 12L,
[0438] MGF 360 5L, 6L, 7L, 10L, 11L, 12L, 13L, 14L, 20R, 21R and 22R, and
[0439] MGF 505 1R, 2R and 6R.

[0440] 4. An attenuated ASF virus according to any preceding para wherein the K145R gene is at least partially deleted, preferably completely deleted.

[0441] 5. An attenuated ASF virus according to para 4 wherein the K145R gene is interrupted.

[0442] 6. An attenuated ASF virus according to any preceding para wherein the EP153R gene is at least partially deleted, preferably completely deleted.

[0443] 7. An attenuated ASF virus according to any preceding para wherein the EP153R gene is interrupted.

[0444] 8. An attenuated ASF virus according to any preceding para which comprises functional versions of all ASF virus genes other than EP153R and K145R.

[0445] 9. An attenuated ASF virus according to any preceding para wherein the genome of the attenuated ASF virus corresponds to, or essentially corresponds to, genotype II.

[0446] 10. An attenuated ASF virus according to para 9 wherein the genome of the attenuated ASF virus corresponds to, or essentially corresponds to, that of the Georgia 2007/1 strain.

[0447] 11. An ASF virus according to any of paras 1 to 10 for use in treating and/or preventing a disease in a subject.

[0448] 12. Use of an ASF virus according to any of paras 1 to 10 for manufacture of a medicament for treating and/or preventing disease in a subject.

[0449] 13. A pharmaceutical composition comprising an ASF virus according to any of paras 1 to 10.

[0450] 14. A pharmaceutical composition according to para 13 for use in treating and/or preventing a disease in a subject.

[0451] 15. An ASF virus for use according to para 11, use of an ASF virus according to para 12, or a pharmaceutical composition for use according to para 14, wherein the disease is African Swine Fever.

[0452] 16. A vaccine comprising an ASF virus according to any of paras 1 to 10.

[0453] 17. A vaccine according to para 16 for use in treating and/or preventing African Swine Fever in a subject.

[0454] 18. A vaccine for use according to para 17 wherein the African Swine Fever is caused by an ASF virus of a different genotype to the ASF virus of the vaccine.

[0455] 19. A method for treating and/or preventing African Swine Fever in a subject which comprises the step of administering to the subject an effective amount of a pharmaceutical composition according to para 13 or a vaccine according to para 16.

[0456] 20. An ASF virus for use according to para 11, use of an ASF virus according to para 12, a pharmaceutical composition for use according to para 14, a vaccine for use according to para 17, or a method according to para 19, wherein the subject is a domestic pig.

[0457] 21. A vaccine for use according to any of paras 17, 18 or 20, or a method according to claim 19 or 20, in which the vaccine is administered following a prime-boost regime.

[0458] 22. A method of attenuating an ASF virus which comprises disrupting the expression and/or activity of the EP153R and K145R genes.

[0459] 23. A method according to para 22 wherein the K145R gene is at least partially deleted, preferably completely deleted.

[0460] 24. A method according to para 23 wherein the K145R gene is interrupted.

[0461] 25. A method according to any of paras 22 to 24 wherein the EP153R gene is at least partially deleted, preferably completely deleted.

[0462] 26. A method according to any of para 22 to 25 wherein the EP153R gene is interrupted.

[0463] The invention will now be further described by way of Examples, which are meant to serve to assist one of ordinary skill in the art in carrying out the invention and are not intended in any way to limit the scope of the invention.

### EXAMPLES

### Example 1-Identification of EP402R/CD2v Mutants that Reduce HAD

[0464] Mutations were made in African swine fever virus (ASFV) Benin isolate EP402R protein (CD2v) and tested for their effect on haemadsorption (HAD).

[0465] A model of the extracellular, N-terminal, IgG-like, ligand-binding domain of CD2v was generated and used to predict the functional amino acid residues involved in binding of CD2v to its ligand. These residues were individually mutated to generate a set of mutant CD2v proteins.

[0466] Vero cells were infected with modified vaccinia virus Ankara expressing T7RNA polymerase and transfected with plasmids (pcDNA3) expressing wild-type or mutant CD2v full-length proteins with a C-terminal HA epitope tag. Pig red blood cells were added and cells observed for attachment of red blood cells to the surface. Expression of the wild-type or mutant CD2v proteins was confirmed both by confocal microscopy using permeabilised cells and Western blotting using an antibody recognising the HA tag and a secondary antibody. Cell surface expression of the wild-type or mutant CD2v was also confirmed by staining non-permeabilised cells with sera from pigs immunised with attenuated ASFV containing a wild-type CD2v gene followed by a secondary antibody (FIG. 1).

[0467] Mutation of residues E99 or Y102 in Benin CD2v abrogated HAD. FIG. 2 shows exemplary images from the HAD assay. FIG. 2A shows cells transfected with a plasmid expressing wild-type Benin CD2v. HAD of red blood cells is observed around three cells. FIG. 2B shows cells expressing CD2v with the Y102 residue mutated to D. Partial HAD is observed around one cell. FIG. 2C shows cells expressing CD2v with residue E99 mutated to R. No HAD is observed.

[0468] Benin CD2v residue E99 is strongly conserved in ASFV, as shown by an alignment of the amino acid sequence of CD2v ligand-binding domain from different ASFV isolates of varying genotypes (FIG. 3). The equivalent residue in other isolates (highlighted in yellow in FIG. 3) is either identical (E) or has the same charge (Q).

[0469] The residue corresponding to Benin CD2v E99 in Georgia CD2v, Q96, was mutated to R and the ability of the mutant protein to induce HAD was tested using the HAD assay described above (wild type and mutant CD2v protein expressed from plasmids in Vero cells). Mutation of Q96 in Georgia CD2v abrogated HAD. FIG. 4 shows exemplary images from the HAD assay of Vero cells with pig red blood cells. FIG. 4A shows Vero cells transfected with a plasmid expressing wild-type Benin CD2v. HAD of red blood cells is observed around four cells. FIG. 4B shows Vero cells expressing wild-type Georgia CD2v. HAD is observed around two cells. FIG. 4C shows Vero cells expressing Georgia CD2v with residue Q96 mutated to R. No HAD is observed. FIG. 4D shows non-transfected Vero cells. No HAD is observed.

[0470] Using the same assay, the following mutations were determined to impact HAD in Benin: N16R, I 19R, W21D, Y 76D, E99R, Y102D. In addition, a combination of E99R+N108R was determined to impact HAD in Benin.

[0471] The following mutations were determined to impact HAD in Georgia: S15R, W19D, Q96R, N104R, and K108D. In addition, combinations of S15R+W19D and Q96R+N104R were determined to impact HAD in Georgia.

[0472] The following mutations were determined to impact HAD in N10 Genotype IX: W20D, R125D, Q112R+N121R.

### Example 2-Screening for DIVA Markers

[0473] For a gene to serve as a Differentiation of Infected from Vaccinated Animals (DIVA) marker, the protein expressed from the gene must be immunogenic. In other words, a subject infected with a virus expressing the DIVA protein must produce antibodies that specifically bind the DIVA protein. In this way, animals vaccinated with a DIVA vaccine (virus lacking the DIVA marker gene) can be differentiated from animals infected with wild type virus (which expresses the DIVA marker gene) because sera of vaccinated animals will not comprise antibodies to the DIVA marker protein, whereas sera of infected animals will comprise antibodies to the DIVA marker protein.

[0474] A selection of ASFV genes that might serve as DIVA markers were screened by expressing each gene in cells and testing whether the protein produced could be detected by sera taken from pigs that had previously been infected with ASFV. Detection by the sera would indicate that the protein, expressed by ASFV in the infected pigs, had induced an antibody response in the infected pigs. Such proteins were therefore candidates for DIVA markers.

[0475] In particular, 71 plasmids coding for individual ASFV genes (excluding known essential genes) fused to an HA or V5 epitope tag were transfected into Vero cells. The cells were fixed, permeabilised and stained with antisera from pigs that had been infected with different strains of ASFV, followed by a fluorescently labelled secondary antibody. Confocal microscopy was used to assess whether the expressed gene could be detected by the sera. In parallel the cells were stained with an antibody against the HA or V5 tag fused to the ASFV gene and a different fluorescently labelled secondary antibody to confirm expression of the protein.

[0476] The pig sera used for staining the cells were from pigs from immunisation studies that had been immunised with the following ASFV strains: BeninΔDP148R (5 pigs), BeninΔMGF (6 pigs), OURT88/3 (5 pigs) and GeorgiaΔMGF (4 pigs). For each pig, a pre-immunisation serum sample (as a control) and a post-immunisation, pre-challenge serum sample were used.

[0477] An initial screen of the genes was conducted using sera from BeninΔDP148R immunised pigs (pre-immunisation sera from day 0, post-immunisation sera from day 38 post-immunisation). ASFV genes CP204L, B646L and E183L were used as positive controls and were detected using post-immunisation sera. Pre-immunisation sera did not detect any genes.

[0478] Six ASFV genes were detected using BeninΔDP148R post-immunisation sera, as shown below in Table 7 (++ indicates strong detection, + indicates weak detection, − indicates no detection).

TABLE 7

| | BeninΔDP148R post-immunisation serum (day 38) | | | | |
|---|---|---|---|---|---|
| ASFV gene | Pig 1 | Pig 2 | Pig 3 | Pig 4 | Pig 5 |
| B125R | ++ | ++ | − | − | + |
| B175L | ++ | ++ | − | + | − |
| E184L | ++ | ++ | − | − | + |
| H339R | − | ++ | − | ++ | ++ |
| K145R | ++ | ++ | − | − | − |
| M448R | ++ | − | + | ++ | + |

[0479] The six ASFV genes detected in the initial screen were then tested with pig serum from the other three immunisation studies.

[0480] Table 8 below shows detection of ASFV genes using post-immunisation sera from 6 pigs immunised with BeninΔMGF virus (boosted on day 15, post-immunisation serum taken on day 38 post-immunisation; pre-immunisation sera were negative).

TABLE 8

| | BeninΔMGF post-immunisation serum (day 38) | | | | | |
|---|---|---|---|---|---|---|
| ASFV gene | Pig 1 | Pig 2 | Pig 3 | Pig 4 | Pig 5 | Pig 6 |
| B125R | ++ | ++ | + | ++ | ++ | ++ |
| B175L | ++ | ++ | ++ | ++ | ++ | ++ |
| E184L | ++ | ++ | ++ | ++ | ++ | + |
| H339R | − | − | + | + | ++ | ++ |
| K145R | + | − | − | ++ | ++ | ++ |
| M448R | ++ | − | ++ | − | + | ++ |

[0481] Table 9 below shows detection of ASFV genes using post-immunisation sera from 5 pigs immunised with OURT88/3 virus (post-immunisation serum taken on day 20 post-immunisation; pre-immunisation sera were negative except for pig 2).

TABLE 9

| | OURT88/3 post-immunisation serum (day 20) | | | | |
|---|---|---|---|---|---|
| ASFV gene | Pig 1 | Pig 2 | Pig 3 | Pig 4 | Pig 5 |
| B125R | ++ | ++ | + | + | − |
| B175L | ++ | ++ | + | ++ | + |
| E184L | ++ | ++ | + | ++ | ++ |
| H339R | ++ | ++ | + | ++ | + |
| K145R | ++ | ++ | + | + | + |
| M448R | ++ | ++ | + | ++ | + |

[0482] Table 10 below shows detection of ASFV genes using post-immunisation sera from 4 pigs immunised with GeorgiaΔMGF virus (post-immunisation serum taken on day 34 post-immunisation; pre-immunisation sera taken on day-3 were negative). 2 pigs (A) were immunised with 103 GeorgiaΔMGF; 2 pigs (B) were immunised with 104 GeorgiaΔMGF.

TABLE 10

| | GeorgiaΔMGF post-immunisation serum (day 34) | | | |
|---|---|---|---|---|
| ASFV gene | Pig 1 (A) | Pig 2 (A) | Pig 3 (B) | Pig 4 (B) |
| B125R | − | ++ | + | − |
| B175L | + | − | − | + |
| E184L | − | − | ++ | + |
| H339R | − | + | − | − |
| K145R | − | ++ | + | − |
| M448R | − | − | ++ | − |

[0483] K145R protein was detected by 65% of sera and B125R was detected by 75% of sera. Each of the B125R, B175L, E184L, H339R, K145R and M448R genes was individually deleted. The B175L, E184L, H339R or M448R genes could not be deleted, suggesting that that are essential for virus replication. Thus, the screen identified the K145R and B125R genes as the most promising potential DIVA markers.

[0484] FIG. 5 shows K145R and B125R expressed in cells. Vero cells were transfected with plasmids expressing K145R or B125R with a HA epitope tag fused in frame. The expressed proteins were detected in permeabilised cells using an antibody against HA and imaged using a confocal microscope. Green staining shows the expressed proteins and blue DAPI stain detects DNA. FIG. 5A shows K145R and FIG. 5B shows B125R.

[0485] FIG. 6 shows an example from the screening process of K145R (FIG. 6A) and B125R (FIG. 6B) expressed in Vero cells and detected by antisera from pigs immunised with ASFV. Cells were fixed, permeabilised and stained with anti-HA (red) to detect the expressed proteins and with sera from pigs immunised with an attenuated genotype|Benin97/1 gene deleted ASFV strain (green). Images are shown of cells stained with sera collected before immunisation and at day 38 post-immunisation. DNA is stained in blue.

### Example 3-Generation of Non-HAD ASFV GeorgiaΔK145RΔEP153RCD2vQ96R

[0486] Based on the findings described in the Examples above, ASFV was generated in which the K145R and EP153R genes were deleted and the EP402R/CD2v protein was mutated to comprise the Q96R amino acid substitution. Georgia 2007/1 strain (a strain of ASFV genotype II) was used. The ASFV is accordingly designated GeorgiaΔK145RΔEP153RCD2vQ96R.

[0487] The ability of GeorgiaΔK145RΔEP153RCD2vQ96R to induce HAD was tested. Porcine bone marrow cells were infected with GeorgiaΔK145RΔEP153RCD2vQ96R or wild type Georgia 2007/1 as control, pig red blood cells were added and the cells observed for attachment of red blood cells to the surface. HAD was observed in cells infected with wild type Georgia 2007/1 at 1 day post-infection (FIG. 7A-red blood cells accumulate around infected cells) whilst HAD was not observed in cells infected with GeorgiaΔK145RΔEP153RCD2vQ96R at 1 day post-infection (FIG. 7B).

### Example 4-Georgia AK145RΔEP153RCD2vQ96R is Attenuated and Induces Protection Against Challenge

### Vaccination Experimental Protocol

[0488] A group of six Large White/Landrace pigs (Group K) varying in weight from 17 to 19 kg and aged 7 weeks old were immunised by the intramuscular route with 104 TCID₅₀ in 1 ml with GeorgiaΔK145RΔEP153RCD2vQ96R and boosted after 21 days by the same route with the same dose. After a further 18 days the Group K immunised pigs and a control group of 3 non-immune pigs (Group M) were challenged by the intramuscular route with 103 TCID₅₀ in 1 ml with virulent genotype II ASF virus Georgia 2007/1. After a further 20 days pigs were terminated. This experimental protocol is depicted in FIG. 8.

### Temperature and Clinical Scores

[0489] Temperatures (FIG. 9) and clinical scores (FIG. 10) of the pigs were recorded daily using a standard scoring system (King et al., 2011). The clinical scores include temperatures and other signs such as loss of appetite or lethargy.

[0490] The control group M of non-immune pigs developed an increased temperature (FIG. 9A) and other clinical signs typical of acute ASFV, including not eating and lethargy, from day 4 post-challenge and were euthanised on day 6 post-challenge at a moderate severity end point (FIG. 10A).

[0491] Two of the pigs in the immunised group K had a transient increase in temperature above 40.6 for 2 days starting at day 11 post-immunisation (FIG. 9B). These and all other pigs in Group K had no other clinical signs post-boost or after challenge (FIG. 10B).

[0492] Previous work had shown that deletion of K145R had minimal direct attenuating effects.

[0493] Viremia data is shown in FIG. 15.

### Scoring of Macroscopic Lesions at Post-Mortem

[0494] At necropsy macroscopic lesions in different organs and cavities were scored according to a standardised scoring system. In FIG. 11 scores are shown on the y axis and pig numbers shown on the x axis. Pigs from group K (immunised with GeorgiaΔK145RΔEP153RCD2vQ96R) showed few lesions, which were mainly slightly enlarged renal or submandibular lymph nodes. In contrast the control non-immune pigs in Group M had lesions typical of acute ASFV including enlarged and haemorrhagic lymph nodes and enlarged spleen.

### Antibody Response of Immunised Pigs

[0495] Sera collected from pigs of group K at different days before immunisation and at different days after immunisation, boost and challenge were tested for levels of antibodies against the major ASFV capsid protein VP72/B646L using a commercial competitive ELISA assay. In FIG. 12 the % of blocking is shown on the y axis and days post-immunization on the x axis. Data for different pigs is shown as indicated by different colours. The grey line indicates the cut-off value indicated by the manufacturer for detection of positive sera. The results show that by day 14 post-immunisation values were positive for all pigs and levels reached a plateau which was maintained during the experiment.

### Cell-Mediated Immune Response

[0496] Peripheral blood mononuclear cells (PBMCs) were collected from pigs of group K before immunisation with GeorgiaΔK145RΔEP153RCD2vQ96R, before boost and before challenge with Georgia 2007/1 virus. The PBMCs were stimulated with ASFV and the number of interferon gamma producing cells measured as an indicator of the cellular immune response to ASFV (FIG. 13).

[0497] The PBMCs were mock stimulated (blue bars) or stimulated with ASFV genotype|Benin97/1 infectious virus (red bars) or ASFV genotype II Georgia 2007/1 virus (green bars). Numbers of interferon gamma producing cells were measured and are shown per 10⁶ cells on the y axis. The pig number is given on the x-axis. The results show very low or no detectable IFN gamma producing cells before immunisation, as expected (FIG. 13A). By day 21 before the boost numbers of IFN gamma producing cells had increased varying between about 100 and 750 cells depending on the ASFV virus used for stimulus (FIG. 13B). The numbers of IFN gamma producing cells following ASFV stimulus were maintained at good levels at day 39 before the challenge (FIG. 13C). IFN gamma production was stimulated by both genotype I and genotype II isolates suggesting a cross-genotype cellular response was induced. As expected, mock-stimulation did not cause a detectable response.

[0498] FIG. 14 shows the number of IFN gamma producing cells for different pigs following stimulation with Georgia 2007/1 isolate over time.

[0499] All publications mentioned in the above specification are herein incorporated by reference. Various modifications and variations of the described methods and system of the invention will be apparent to those skilled in the art without departing from the scope and spirit of the invention. Although the invention has been described in connection with specific preferred embodiments, it should be understood that the invention as claimed should not be unduly limited to such specific embodiments. Indeed, various modifications of the described modes for carrying out the invention which are obvious to those skilled in virology, molecular biology or related fields are intended to be within the scope of the following claims.

1. An attenuated African Swine Fever (ASF) virus in which the expression and/or activity of the genes EP153R and EP402R is disrupted;
and which comprises a functional version of one or more of the following genes:
multigene family (MGF) 110 3L, 6L, 7L, 8L, 10L, 11L and 12L,
MGF 360 5L, 6L, 7L, 10L, 11L, 12L, 13L, 14L, 20R, 21R and 22R, and
MGF 505 1R, 2R and 6R.

2. An attenuated ASF virus according to claim 1 further comprising a Differentiation of Infected from Vaccinated Animals (DIVA) mutation.

3. An attenuated ASF virus in which the expression and/or activity of the genes EP153R and EP402R is disrupted and which comprises a DIVA mutation.

4. An attenuated ASF virus according to claim 2 or 3 wherein the DIVA mutation disrupts expression of the K145R gene.

5. An attenuated ASF virus according to claim 4 wherein the K145R gene is at least partially deleted, preferably completely deleted.

6. An attenuated ASF virus according to claim 4 wherein the K145R gene is interrupted.

7. An attenuated ASF virus according to any of claims 1 to 6 wherein the EP153R gene is at least partially deleted, preferably completely deleted.

8. An attenuated ASF virus according to any of claims 1 to 6 wherein the EP153R gene is interrupted.

9. An attenuated ASF virus according to any of claims 1 to 8 wherein the ability of the ASF virus to induce haemadsorption is reduced compared to a corresponding ASF virus in which the expression and/or activity of the EP153R gene and/or the EP402R gene is not disrupted.

10. An attenuated ASF virus according to any of claims 1 to 9 wherein surface expression of the EP402R protein is reduced compared to a corresponding ASF virus in which the expression and/or activity of the EP402R gene is not disrupted.

11. An attenuated ASF virus according to any of claims 1 to 10 wherein the EP402R gene comprises one or more mutation that disrupts ligand binding by the EP402R protein.

12. An attenuated ASF virus according to claim 10 or 11 wherein the EP402R gene comprises one or more mutation that changes one or more amino acid in the ligand-binding domain of the EP402R protein.

13. An attenuated ASF virus according to claim 12 wherein the one or more amino acid is changed to a different amino acid.

14. An attenuated ASF virus according to claim 13 wherein the change to a different amino acid directly inhibits the interaction between EP402R and its ligand by changing the binding surface on EP402R.

15. An attenuated ASF virus according to any of claims 11 to 14 wherein the one or more mutations change an amino acid at a position in the EP402R protein which corresponds to Q96 and/or W99 of Georgia 2007/1 EP402R protein (SEQ ID No. 24).

16. An attenuated ASF virus according to claim 15 wherein the amino acid at the position which corresponds to Q96 is changed to R or to an amino acid that is a conservative replacement of R and/or the amino acid at the position equivalent to W99 is changed to D or to an amino acid that is a conservative replacement of D.

17. An attenuated ASF virus according to claim 16 wherein the amino acid at the position which corresponds to Q96 is changed to H, K or R and/or the amino acid at the position which corresponds to W99 is changed to D, E, N or Q.

18. An attenuated ASF virus according to claim 17 wherein the amino acid at the position which corresponds to Q96 is changed to R and/or the amino acid at the position which corresponds to W99 is changed to D.

19. An attenuated ASF virus according to any of claims 1 to 12 wherein the EP402R gene is at least partially deleted, preferably completely deleted.

20. An attenuated ASF virus according to any of claims 1 to 12 wherein the EP402R gene is interrupted.

21. An attenuated ASF virus according to claim 1 or any of claims 7 to 20 which comprises functional versions of all ASF virus genes other than EP153R and EP402R.

22. An attenuated ASF virus according to any of claims 1 to 20 which comprises functional versions of all ASF virus genes other than EP153R, EP402R and K145R.

23. An attenuated ASF virus according to any of claims 1 to 22 wherein the genome of the attenuated ASF virus corresponds to, or essentially corresponds to, genotype II.

24. An attenuated ASF virus according to claim 23 wherein the genome of the attenuated ASF virus corresponds to, or essentially corresponds to, that of the Georgia 2007/1 strain.

25. An EP402R protein comprising one or more amino acid change in the ligand-binding domain wherein the amino acid change disrupts ligand-binding of the EP402R protein.

26. An EP402R protein comprising one or more amino acid change at a position which corresponds to Q96 and/or W99 of the Georgia 2007/1 EP402R protein (SEQ ID No. 24).

27. An EP402R protein according to claim 26 wherein the amino acid at the position which corresponds to Q96 is changed to R or to an amino acid that is a conservative replacement of R and/or the amino acid at the position which corresponds to W99 is changed to D or to an amino acid that is a conservative replacement of D.

28. An EP402R protein according to claim 27 wherein the amino acid at the position which corresponds to Q96 is changed to H, K or R and/or the amino acid at the position which corresponds to W99 is changed to D, E, N or Q.

29. An EP402R protein according to claim 28 wherein the amino acid at the position which corresponds to Q96 is changed to R and/or the amino acid at the position which corresponds to W99 is changed to D.

30. An EP402R protein according to any of claims 25 to 29 comprising an amino acid sequence having at least 70% sequence identity with any of SEQ ID Nos 21 to 30 or SEQ ID Nos 242 to 246.

31. An EP402R protein according to claim 30 comprising the amino acid sequence of any of SEQ ID Nos 31, 32, 33 or 379.

32. A polynucleotide encoding the EP402R protein of any of claims 25 to 31.

33. A polynucleotide according to claim 32 comprising a sequence having at least 70% identity with any of SEQ ID Nos 229 to 241.

34. A vector comprising the polynucleotide of any of claims 32 to 33.

35. An ASF virus comprising the EP402R protein of any of claims 25 to 31.

36. An ASF virus comprising the polynucleotide of claim 32 or 33.

37. An ASF virus according to claim 35 or 36 wherein the ability of the ASF virus to induce haemadsorption is reduced compared to a corresponding ASF virus which does not comprise the EP402R protein of any of claims 25 to 31 or the polynucleotide of claim 32 or 33.

38. An ASF virus according to any of claims 35 to 37 which is attenuated.

39. An ASF virus according to any of claims 35 to 38 further comprising a DIVA mutation.

40. An ASF virus according to claim 39 wherein the DIVA mutation disrupts expression of the K145R gene.

41. An ASF virus according to claim 40 wherein the K145R gene is at least partially deleted, preferably completely deleted.

42. An ASF virus according to claim 40 wherein the K145R gene is interrupted.

43. An ASF virus according to any of claims 35 to 42 wherein expression and/or activity of the EP153R gene is disrupted.

44. An ASF virus according to claim 43 wherein the EP153R gene is at least partially deleted, preferably completely deleted.

45. An ASF virus according to claim 43 wherein the EP153R gene is interrupted.

46. An ASF virus according to any of claims 35 to 45 wherein the ASF virus genome corresponds to, or essentially corresponds to, genotype II.

47. An ASF virus according to claim 46 wherein the ASF virus genome corresponds to, or essentially corresponds to, that of the Georgia 2007/1 strain.

48. An ASF virus according to any of claims 1 to 24 or any of claims 35 to 47 for use in treating and/or preventing a disease in a subject.

49. Use of an ASF virus according to any of claims 1 to 24 or any of claims 35 to 47 for manufacture of a medicament for treating and/or preventing disease in a subject.

50. A pharmaceutical composition comprising an ASF virus according to any of claims 1 to 24 or any of claims 35 to 47.

51. A pharmaceutical composition according to claim 50 for use in treating and/or preventing a disease in a subject.

52. An ASF virus for use according to claim 48, use of an ASF virus according to claim 49, or a pharmaceutical composition for use according to claim 51, wherein the disease is African Swine Fever.

53. A vaccine comprising an ASF virus according to any of claims 1 to 24 or any of claims 35 to 47.

54. A vaccine according to claim 53 for use in treating and/or preventing African Swine Fever in a subject.

55. A vaccine for use according to claim 54 wherein the African Swine Fever is caused by an ASF virus of a different genotype to the ASF virus of the vaccine.

56. A method for treating and/or preventing African Swine Fever in a subject which comprises the step of administering to the subject an effective amount of a pharmaceutical composition according to claim 50 or a vaccine according to claim 53.

57. An ASF virus for use according to claim 48 or 52, use of an ASF virus according to claim 49 or 52, a pharmaceutical composition for use according to claim 51 or 52, a vaccine for use according to claim 54 or 55, or a method according to claim 56, wherein the subject is a domestic pig.

58. A vaccine for use according to any of claim 54, 55 or 57, or a method according to claim 56 or 57, in which the vaccine is administered following a prime-boost regime.

59. A method of producing an ASF virus of any of claims 35 to 47, the method comprising changing one or more amino acid in the ligand-binding domain of the EP402R protein wherein the amino acid change disrupts ligand-binding of the EP402R protein.

60. A method of producing an ASF virus of any of claims 35 to 47, the method comprising changing one or more amino acid in the EP402R protein at a position which corresponds to Q96 and/or W99 of the Georgia 2007/1 EP402R protein (SEQ ID No. 24).

61. A method of reducing the ability of an ASF virus to induce haemadsorption, the method comprising changing one or more amino acid changes in the ligand-binding domain of the EP402R protein wherein the amino acid changes disrupt ligand-binding of the EP402R protein.

62. A method of reducing the ability of an ASF virus to induce haemadsorption, the method comprising changing an amino acid in the EP402R protein at a position which corresponds to Q96 and/or W99 of the Georgia 2007/1 EP402R protein (SEQ ID No. 24).

63. A method according to any of claims 59 to 62 further comprising disrupting the expression and/or activity of the EP153R gene.

64. A method of attenuating an ASF virus which comprises disrupting the expression and/or activity of the EP153R and EP402R genes.

65. A method according to claim 64 comprising disrupting the ability of the EP153R gene and/or the EP402R gene to mediate haemadsorption.

66. A method according to any of claims 59 to 65 further comprising introducing a DIVA mutation into the ASF virus.

67. A method according to claim 66 wherein the DIVA mutation disrupts expression of the K145R gene.

68. A method according to claim 67 wherein the K145R gene is at least partially deleted, preferably completely deleted.

69. A method according to claim 67 wherein the K145R gene is interrupted.

70. A method according to any of claims 63 to 69 wherein the EP153R gene is at least partially deleted, preferably completely deleted.

71. A method according to any of claims 63 to 69 wherein the EP153R gene is interrupted.

72. A method according to any of claims 64 to 71 wherein the EP402R gene is at least partially deleted, preferably completely deleted.

73. A method according to any of claims 64 to 71 wherein the EP402R gene is interrupted.

74. A method according to any of claims 64 to 73 comprising introducing one or more mutations in the EP402R gene that reduce surface expression of the EP402R protein reduced compared to a corresponding ASF virus that does not comprise the one or more mutations.

75. A method according to any of claims 64 to 74 comprising introducing one or more mutations in the EP402R gene that disrupt ligand binding by the EP402R protein.

76. A method according to claim 74 or 75 comprising introducing one or more mutations in the EP402R gene that change one or more amino acids in the ligand-binding domain of the EP402R protein.

77. A method according to claim 76 wherein the one or more amino acids are changed to different amino acids.

78. A method according to claim 77 wherein the change to different amino acids directly inhibits the interaction between EP402R and its ligand by changing the binding surface on EP402R.

79. A method according to any of claims 75 to 78 comprising changing an amino acid in the EP402R protein at a position which corresponds to Q96 and/or W99 of the Georgia 2007/1 EP402R protein (SEQ ID No. 24).

80. A method according to any of claims 59 to 79 wherein an amino acid in the EP402R protein at a position which corresponds to Q96 of the Georgia 2007/1 EP402R protein (SEQ ID No. 24) is changed to R or to an amino acid that is a conservative replacement of R and/or an amino acid at a position which corresponds to W99 of the Georgia 2007/1 EP402R protein (SEQ ID No. 24) is changed to D or to an amino acid that is a conservative replacement of D.

81. A method according to claim 80 wherein the amino acid at the position which corresponds to Q96 is changed to H, K or R and/or the amino acid at the position which corresponds to W99 is changed to D, E, N or Q.

82. A method according to claim 81 wherein the amino acid at the position which corresponds to Q96 is changed to R and/or the amino acid at the position which corresponds to W99 is changed to D.

The application's sequence listing, which the Patent Office published only in electronic form, follows.

SEQUENCE LISTING (386 sequences)

SEQ ID NO: 1 - protein, 163 aa, African swine fever virus
MKYSWKNGGGDYWPIIIRHCCFYLVFSIAFVGYIVFAYYKNLHLNTAMKLLALLCILIWLSQPGLNRPLSIFYMKQNLPRTYTPPIRELEYWCTYGKHCDFCWECRNGICKNKVWDDMSSVQEHSYPMEHCMIHRQCKYIRDGPIFQVECTMQTSDATHLINA

SEQ ID NO: 2 - protein, 103 aa, African swine fever virus
MKVFLGLLLGYSTILILTYQSPTTQWCFYEISLKILNHHSMEKWRDKNWSIIIRYYCFYLVFSFAFAGCVAFAICKNLRLCTTMKLLMLLNILVLLSQPILNN

SEQ ID NO: 3 - protein, 375 aa, African swine fever virus
MNSLQVLTKKVLIENKAFSEYHEDDIFILQQLGLWWHNGPIGFCKQCKMVTSGSMSCSDVDSYELDRALVRAVKKNQTDLIKLFVLWGANINYGIICAKTERTKDLCIELGANPEFLDVGLYNMFVDLIKQQKVLLAIDIYYDNISILDSFDSHDFYVLIDFIYNCFILNLDEKEKMIKNTYVLKFWFKIAIEFNLIKPIRFLSKKFPHLDYWRLKTAVYLGNVDEIHHAYFQENIRLDPNDMMSLACMYPQNKLGIYYCFALGANINTALETLIGFINHEVNREITFFSNYGIWSNVHFCISLGANPYTKKIQETLLRQEKNVIMKLLFKKGLLSPHSILHKKILEPSEVRKIISTYEYTETFHSFSLLRDNLR

SEQ ID NO: 4 - protein, 356 aa, African swine fever virus
MVPSLQSFAKKVLASQHVSIDYHVILERCGLWWYKAPISLDCKHMLIKLPNFADGLDLNTALMLATKENNYQLIKMFTDWGADINYGLICANTPPIREFCWELGAKYQVDKKKIMHIFFKLIHPNTTSNNIILCLKFFNDNPFSAYVIIREIKSCIHWKLKNLAEDTNVLSNISDGDMLTIYCFIVALQDNLREAISYVYQHFKYLNTWWLTCALCYNKLFDLHNLYEKEKIRMDMDEMMRIACTKDNNFLTIYYCFILGANINLAMIASIRFYNMDNLFFCIDLGADAFEEAKALAEQQNYYLISHRLSLDIYSPDSSLLTLKEADPNKIYRLLKNYKSKSMLAYLNYDINDTSL

SEQ ID NO: 5 - protein, 353 aa, African swine fever virus
MLPSLQSLTKKVLAGQCVSVDHYHILKCCGLWWHNGPIMLHIRRNKLFIRSTCFSQGIELNIGLMKAVKENNHDLIKLFTEWGADINYGMICALTENTRDLCKELGAKEYLEREYILKIFFDTTRDKTSSNIIFCHEVFSNNPNLRIIDNLDLRGEIMWELRGLMEITFMLDHDDSFSTVLTKYWYAIAVDYDLKDAIRYFYQKYPRLHRWRLMCALFYNNVFDLHELYEIERVRMDIDEMMHIACIQDYSYSAIYYCFIMGANINQAMLVSIQNYNLGNLFFCIDLGANAFEEGKALAEQKENYLIAHALSLKHYNPVISLLSNVMDPEKINYMLKNYHSINMGIFLDYEQR

SEQ ID NO: 6 - protein, 350 aa, African swine fever virus
MLPSLQSLTKKVLAGQCVPTNQHYLLKYYDLWWYNAPITFDHNLRLIKSSGIKEGLDLNTALVKAVRENNYSLIKLFTEWGADINYGLVSVNTEHTRDLCQELGAKEILNEEEILQIFIDLKFHKTSSNIILCHEVFSNNPILQKVNNLKLRIEIFWELRELIEKTDLLNNEFLLSTLLLKYWYAIAVRYSLKEAIQYFYQKYTHMNTWRLTCALCFNNVFDLHEAYEKDKIHMDIEEMMRIACIKDHNLSTMYYCYMLGANINQAMLTSIQYYNIENMFFCMDLGADVFEEGTTALGEGYELIKNILSLKIYSPTTIPLPKSTDPEIIDHALKNYFSKNMMIFLSYDLR

SEQ ID NO: 7 - protein, 353 aa, African swine fever virus
MSLPLSLQTLVKKTVASQCLSIDEHCILKYCGLWWHDAPLKLCMDRGRIQIKSGFLGEDIDLRVALIIAVKENNYSLIKLFTEWGANINYSLLSINTKHIRELCRQLGAKETLEDNDIFRIFTRIMHNKTSGSIILCHEIFMNNPMLENKFVIQLRGLIYKRLWGLIEIKETDELNDLLVKYWYAKAVQYVCKNAICFLDEKYTDLNEWRLKCLLYYNKIYELHEMYHKKKVQIDVHDMICLACAKDNNLLTIYYCYALGGNINQAMLTSVQYYNVGNIFFCIDLGGNAFEEGRAIAEQKGYNFLSHSLTLDIYSSDASLPLNLKDPEKISSLLKDYKSKNLSIIWEYSHNIL

SEQ ID NO: 8 - protein, 357 aa, African swine fever virus
MLSLQTLAKKVVACNYLSSDYDYTLQRFGLWWDLGPIHLCNNCKQVFSYKHLQCFSEDDLCLEAALVKAVKSDNLELIRLFVDWGANPEYGLIRVPAVYLKRLCAELGGLTPVSEPRLLEILKEVANLKSCAGVLLGYDMFCHNPLLETVTRTTLDTVTYTCSNIPLTGDTAHLLLTKFWFALALRHNFTKAIHYFYKRHKNQLYWRVACSLYFNNIFDIHELCREKEICISPNLMMKFACLREKNYAAIYYCHRLGASLDYGMNLSIYNNNTLNMFFCIDLGAADFDRAQLIAHKAYMYNLSNIFLVKQLFSRDVTLVLDVTEPQEIYDMLKTYTSKNMKRAEEYLTAHPEIIVID

SEQ ID NO: 9 - protein, 531 aa, African swine fever virus
MFSLQNLCRKTLPDCKLPEFFDDYILQLLGLYWENHGTIQRAGNNCVLIQQHTLIPVNEALRIAASEENYEIVGLLLAWEGNLYYAIIGALEGNRYNLIRKYDDQIKDHHDILPFIDDPIIFHKCHIMRRCFFDCILYQAVKYSKFRVLLYFKYTLEDDLPLVHLLIEKACEDHNYEVIKWIYENLHVCHIIDTFDCAIAHKDLRLYCLGYTFIYNRIVPYKYHHLDILILSSLQLLHKVAAKGYLDFILETLKYDHNIDNLDVILTQAATYNHRKILTYFIPQSTYAQIEQCLFVAIKTKSSKKTLNLLLSHLNLSIKLIQKISQYVATFNSTNIIGILSMKRKKKIYLDIILTKFVKNAIFNKFVVRCMERFSINPERIVKMAARINKMMLVKKISEHVWKNHAARLKHLKHAVHTMKHKDGKNRLMNFIYEHCYYHMQGEEIFSLARFYAIHHAPKLFDVFYNCCILDTIRFKSLLLDCSHIIGKNAHDATNINIVNKYIGNLFAMGVLSKKEILQDYPSIYSKHYMP

SEQ ID NO: 10 - protein, 526 aa, African swine fever virus
MFSLQDLCRKHLFILPDVFGEHVLQRLGLYWRCHGSLQRIGDDHILIRRDLILSTNEALRMAGEEGNNEVVKLLLLWKGNLHYAVIGALQGDQYDLIHKYENQIGDFHFILPLIQDANTFEKCHALERFCGVSCLLKHATKYNMLPILQKYQEELSMRAYLHETLFELACLWQRYDVLKWIEQTMHVYDLKIMFNIAISKRDLTMYSLGYIFLFDRGNTEATLLTQHLEKTAAKGLLHFVLETLKYGGNIDTVLTQAVKYNHRKLLDYFLRQLPRKHIEKLLLLAVQEKASKKTLNLLLSHLNYSVKRIKKLLRYVIEYESTLVIKILLKKRVNLIDAMLEKMVRYFSATKVRTIMDELSISPERVIKMAIQKMRTDIVIHTSYVWEDDLERLTRLKNMVYTIKYEHGKKMLIKVMHGIYKNLLYGEREKVMFHLAKLYVAQNAATQFRDICKDCYKLDVARFKPRFKQLILDCLEIVTKKSCYSILEILEKHIISLFTMKVMTEEEKNLCLEILYKVIHYKTIQC

SEQ ID NO: 11 - protein, 254 aa, African swine fever virus
MQNKIPNFNLFFFFLYRMLEIVLATLLGDLQRLRVLTPQQRAVAFFRANTKELEDFLRSDGQSEEILSGPLLNRLLEPSCPLDILTGYHLFRQNPKAGQLRGLEVKMLERLYDANIYNILSRLRPKKVRNKAIELYWVFRAIHICHAPLVLDIVRYEEPDFAELAFICAAYFGEPQVMYLLYKYMPLTRAVLTDAIQISLESNNQVGICYAYLMGGSLKGLVSAPLRKRLRAKLRSQRKKKDVLSPHDFLLLLQ

SEQ ID NO: 12 - protein, 237 aa, African swine fever virus
MLEIVLATLLGDLQRLRVLTPQQRAVAFFRANTKELEDFLCSDGQSEEILSGPLLNRLLEPSGPLDILTGYHLFRQNPKAGQVRGLEVKMLERLYDANIYNILSRLRPEKVRNKAVELYWVFRAINMCHAPLVLDIVRYEEPDFAELAFICAAYFGEPQVMYLLYKYMPLTRAVLTDAIQISLESNSQVGICYAYLMGGSLKGLVRAPLRKRLRAKLRSQRKKKDVLPPHDFLLLLQ

SEQ ID NO: 13 - protein, 257 aa, African swine fever virus
MQNKIPNFNLFFFFLYKMLEIVLATLLGDLQKLKDLTPPQRAVAFFRANTKELEDFLYPDGQSEELLPGLLLNRLLEPSGSIDILTGYHLFRENPKAGRLRGLEVKMLERLYDANIYNMLARLRPELVRDKAIELYWLFRAILMCHSPLVLEIVRHETMDFAETAFICAAYFSEPQVMYALYKFIPISRAVLADAIQMCLESNSEAGICYAYLMGGSLKGKVPGSLRKRLRASPLRQERKKKNVLPPHEFLLMLHGI

SEQ ID NO: 14 - protein, 240 aa, African swine fever virus
MLEIVLATLLGDLQKLRDLTPMQRAVAFFRVNTKELEDFLYPDGQSEELLPGLLLNRLLEPSGPIDILTGYHLFRENPKAGRLRGLEVKLLERLYDANIYNMLAQIRPELVRIKAIELYWLFRAILMCHSPLVLEIVRHETMDFAELAFICAAYFSEPQVMYALYKFIPISRAVLADAIEMSLESNSETGICYAYLMGGSLKGKVPGPLRKRLRASPLRQERKKKNVLPPHEFLLMLHGI

SEQ ID NO: 15 - protein, 254 aa, African swine fever virus
MQNKIPNFNLFFFFLYRMLEIVLATLLGDLQRLRVLTPQQRAVAFFRANTKELEDFLCSDGQSEEILSGPLLNRLLEPSGPLDILTGYHLFRQNPKAGQLRGLEVKMLERLYDANIYNILSRLRPEKVRNKAIELYWVFRAIHICHAPLVLDIVRYEEPDFAELAFICAAYFGEPQVMYLLYKYMPLTRAVLTDAIRISLESNNQVGICYAYLMGGSLKGLVSAPLRKRLCAKLRSQRKKKDVLSPHDFLLLLQ

SEQ ID NO: 16 - protein, 237 aa, African swine fever virus
MLEIVLATLLGDLQRLRVLTPQQRAVAFFRANTKEVEDFLCSDGQSEEVLSGPLLNRLLEPSGPLDILTGYHLFRQNPKAGQVRGLEVKMLERLYDANIYNILSRLRPEKVRNKAVELYWVFRAINMCHAPLVLDIVRYEEPDFAELAFICAAYFGEPQVMYLLYKYMPLSRAVLTDAIQISLESNSQVGICYAYLMGGSLKGLVRAPLRKRLRAKLRSQRKKKDVLPPHDFLLLLQ

SEQ ID NO: 17 - protein, 237 aa, African swine fever virus
MLEIVLATLLGDLQRLRVLTPQQRAVAFFRANTKELEDFLCPDGQSEEVLSGSLLNRLLEPSGPLDILTGYHLFRQNPKAGQLRGLEVKMLERLYDANIYNILSRLRPEKVRNKAVELYWVFRAINMCHAPLVLDIVRNEELDFAELAFICAAYFGEPQVMYLLYKYMPLTRAVLTDAIQISLESNSQVGICYAYLMGGSLKGLVRAPLRKRLRAKLRSQRKKKDVLPPHDFLLLLQ

SEQ ID NO: 18 - protein, 254 aa, African swine fever virus
MQNKIPNFNLFFFFLYRMLEIVLATLLGDLQRLRVLTPQQRAVAFFRANTKELEDFLCSDGQSEEILSGPLLNRLLEPSGPLDILTGYHLFRQNPKAGQLRGLEVKMLERLYDANIYNILSRLRPEKVRNKAIELYWVFRAIHICHAPLVLDIVRYEEPDFAELAFICAAYFGEPQVMYLLYKYMPLTRAVLTDAIRISLESNNQVGICYAYLMGGSLKGLVSAPLRKRLRAKLRSQRKKKDVLSPHDFLLLLQ

SEQ ID NO: 19 - protein, 72 aa, African swine fever virus
MQNKIPNFNLFFFFLYRMLEIVLATLLGDLQRLRVLTPQQRAVAFFRANTKELEDFLRSDGQSEEILSGPPP

SEQ ID NO: 20 - protein, 153 aa, African swine fever virus
MYFKKKYIGLIDKNCEKKILDDSSTIKICYILIGILIGTNMITLIYNFIFWDNYIKCYRNNDKMFYCPNDWVGYNNICYYFSNGSFSKNYTAASNFCRQLNGTLANNDTNLLNLTKIYNNQSMYWVNNTVILRGDNKYSQKVNYTDLLFICGK

SEQ ID NO: 21 - protein, 402 aa, African swine fever virus
MIIIVIFLMCLKIVLNNIIIWSTLNQTVFLNNIFTINDTYGGLFWNTYYDNNRSNFTYCGIAGNYCSCCGHNISLYNTTNNCSLIIFPNNTEIFNRTYELVYLDKKINYTVKLLKSVDSPTITYNCTNSLITCKNNNGTNVNIYLIINNTIVNDTNGDILNYYWNGNNNFTATCMINNTISSLNETENINCTNPILKYQNYLSTLFYIIIFIVSGLIIGIFISIISVLSIRRKRKKHVEEIESPPPSESNEEDISHDDTTSIHEPSPREPLLPKPYSRYQYNTPIYYMRPSTQPLNPFPLPKPCPPPKPCPPPKPCPPPKPCPPPKPCSPPKPCRPPKPCPPPKPCPPPKPCPPPKPCPPSKPCPSPESYSPPKPLPSIPLLPNIPPLSTQNISLIHVDRII

SEQ ID NO: 22 - protein, 392 aa, African swine fever virus
MIIILIFLICLKIVLNNNIIIWHTLNETIFLNNSITFTDNLGGLFWNTYYNNNHSILTSCGIYQNYCSCTNNYSTSLYNITNNCGLIIFPNNTKRFNTTYELVYLNNSTKYTINLLVPVTPPNITYNCTTSVITCKKNDGTNTNMFLKINDTIVKSSNESVFEYSWNSTDLNNNFTAICIINNTINSSNDTQTIECPNILLNNYLDFFQVTSYMFYMIIFIVTGIIASIFISIITFLSLRKRKKHVEEIESPPPSESNEEDISHDDTTSIHEPSPREPLLPKPYSRYQYNTPIYYMRPSTQPLNPFPLPKPCPPPKPCPPPKPCPPPKPCPPPKPCRPPKPCPPPKPCPPPKPCPSPETYSPPKPLPNIPLLPNIPPLSTQNISLIHVDRII

SEQ ID NO: 23 - protein, 389 aa, African swine fever virus
MIIILIFLIYLKLVLNNNIIIWHPTLNETIFLNVTTIGNISGLFWNTYYNNNRSELTKCGIYNNYCSCDSLNTSLYNINNCSLVIFPNNTKIFNTIYELIYSGNQTNYTIKLLESTTPPNITYNCTTSVITCKKNNGTNTNIFLTINNTIVNSTNEDVIYYYWNRSEFNNFTATCMINNTINSSNISEIIDCTNTLLLNSYLDFFQVAGYMFYMIIFIVTGITVSIFISIITFLSLRKRKKHVEEIESLPPESNEEECQHDDDTTSIHEPSPREPLLPKPYSRYQYNTPIYYMRPSTQPLNPFPLPKPCPPPKPCPPPKPCPPPKPCPPPKPCPPPKPCPPPESCSSPESCSSPESYSPPKPLPSIPLLPNIPPLSTQNISLIHVDRII

SEQ ID NO: 24 - protein, 360 aa, African swine fever virus
MIILIFLIFSNIVLSIDYWVSFNKTIILDSNITNDNNDINGVSWNFFNNSFNTLATCGKAGNFCECSNYSTSIYNITNNCSLTIFPHNDVFDTTYQVVWNQIINYTIKLLTPATPPNITYNCTNFLITCKKNNGTNTNIYLNINDTFVKYTNESILEYNWNNSNINNFTATCIINNTISTSNETTLINCTYLTLSSNYFYTFFKLYYIPLSIIIGITISILLISIITFLSLRKRKKHVEEIESPPPESNEEEQCQHDDTTSIHEPSPREPLLPKPYSRYQYNTPIYYMRPSTQPLNPFPLPKPCPPPKPCPPPKPCPPPKPCPSAESYSPPKPLPSIPLLPNIPPLSTQNISLIHVDRII

SEQ ID NO: 25 - protein, 375 aa, African swine fever virus
MIIILIFLIIPNIVLSIDYWVSFNKTIILDSNITNDNNDINGVSWNFLNNSLNTLATCGKAGNFCECSNYSTSLYNIAHNCSLTIFPHNDVFGTPYQVVWNQIINYTIKLLTPVTPPNITYNCTNFLITCKKNNGTNTIIYFNINDTNVKYTNESILEYNWNNSNFNNFTATCIINNTINSSNDTQTIDCINTLLSSYLDFFQVASYMFYMIIFIATGIIASIFISIITFLSLRKRKKHVEEIESPSPSESNEEEQCQHDDTTSIHEPSPREPLLPKPYSRYQYNTPIYYMRPLTQPLNPSPLPKLCPPPKPCPPPKPCPPPKPCPPPKPCPSSESCSPPESYSLPKPLPNIPLLPNIPPLSTQNISLIHVDRII

SEQ ID NO: 26 - protein, 392 aa, African swine fever virus
MIIKLIFLICFKIVLSIDNKTKFNETLILDNIDYWVKFNDTITLDSNITSEIEAVSWNFYNNTFNLLAICGKASNFCSCSNYSTSFFNITNNCSLTIFLIDETLFNTTYQIVYSTNIINYKINLLIPVTPPIISYNCANCSINCKKSNGTNTNIFLSINDTIVTYTNESILNYDYNCSILNNNFTVTCIINNTISTSNTTEFINCTNILLSSYLDFFQVTSYIFYMIIFIVTGITVSILISIITFLFIRKRKHVEEIESPPPESNEEEQQCHHDTTSIHEPSPREPLLPKPYSRYQYNTPIYYMRPSTQQLFKSYSLPKPCPPPKPCPPPKPCPPPKPCPPSKPCPPPEPYSPPKPCPPPKPYPSLPSIPLPPDIPPLSTQNISLIHVDRII

SEQ ID NO: 27 - protein, 385 aa, African swine fever virus
MIIKLIFLISFKMILGIDYWVSLNNTIILDSNITINNITNTTNNPTLNGIFWNIYNNSYNNTFNLLTTCGNTYNICSCSNNYNTILFNYNTTNNCSLIISPHDEKIFDTMFQIIYLTNKINYTIRWLQPVDPPNISFNDSNSLIKCEKNNGTNTEIYLYLNDTFINNTNENDLKYYWNCSELNYNITATCIINNTLNSANTTKVINCTNLLLKSDQNYFLKNIHTLFYIIIFIVTGIIISIFIAIITFLSLRKRKKHVEEIESPSPESNEEEEQQHHHDTTSIHEPSPREPLLPKPYSRYQYNTPIYYMRPSTQQLFKSYSLPKPCPPPKPCPPPKPCPPPKPCPSPESYPSPEPYPLLPNIPLPPNIPPLSTQNISLIHVDRII

SEQ ID NO: 28 - protein, 382 aa, African swine fever virus
MIIKVIFLVFFKMVLSNIIIWSTLNNTIYLNINYSDSNLYTGLFWNKYYNNTRNNFTTCVTSNSSYCTCKGHNTSLYNITNNCSLIIFPNNTKIFNTTYELVYLNNKINYTIQMVQPVDPPIIIYNDTNNSLITCEKNNGTNTEIYLYLNDTFINNTNENSIKYYWNCSELNHNITTTCIINNTLNSANTTKVINCTNLLLKSDQNYFLKNIHTLFYIIIFIVGGTLISIIISIITFLSLRKRKKHVEEIESPPPSESNEEEHCQHDDTTSIHEPSPREPLLPKPYSRYQYNTPIYYMRPSTQPLNPFPLPKPCPPPKPCPPPKPCPPPKPCPPPKPCPPPKPCPSPESHSPPKPLPSIPLLPNIPPLSTQNISLIHVDRII

SEQ ID NO: 29 - protein, 404 aa, African swine fever virus
MFITLIFLSYINIVLSNNYWARLNETITLNSNITNDTNNELGIFWNSYNNTYYNNTFNNIAICGKKGIFCECNINYNTSISNTSISNTSIYNVTNNCSLTIFLYDDNIFKTYQLVYQNYKINYTINLLLPVTSPNITYNCTNSLITCEKNDGTNTNMFLSINNITINHTNQDILTYYWNNSEFNNFTATCMINNTLNSANTTKVINCTNPLLNSYQNYFLENIHTLFYIIIFIVSGLIASIFISIITFLSLRKRKKHVEEIESPPPESNEEEQCQHDDTTSIHEPSPREPLLPKPYSRYQYNTPIYYMRPSTQPLNPFPLPNPCPPPKPCPPPKPCPPPKPCPPPKPCPPPKPCPPPKPCPPPKPCSSPESYSPPKPLPSIPLLPNIPPLSTQNISLIHVDRII

SEQ ID NO: 30 - protein, 381 aa, African swine fever virus
MIIKLIFLICFKIVLSINYWVRYNDTVTLNSNINSETEGIFWNFYNNTFNTIATCGKKNNVCECSNYDKSLYNITNNCSLTIFPNNTKIFNTTYQLVYSRNRINYTINLLLPVTSPIITYNCTQSLITCEKTNGTNIHLFLNLNDTINEYTNKSFLNYYWNSSELNNIFLATCIINNTLNSANTTKVINCTNPLLKSYQNYFLENIHTLFYMIIFIVSGITISIFISIITFLSLRKRKKHVEEIESPPPESNEEEQCQHDDTTSIHEPSPREPLLPKPYSRYQYNTPIYYMRPSTQPLNPFPLPKPCPPPKPCPPPKPCPPPKPCPPPKPCPPPKPCPPPKPCPPPESYSPPKPLPSIPLLPNIPPLSTQNISLIHVDRII

SEQ ID NO: 31 - protein, 402 aa, African swine fever virus
MIIIVIFLMCLKIVLNNIIIWSTLNQTVFLNNIFTINDTYGGLFWNTYYDNNRSNFTYCGIAGNYCSCCGHNISLYNTTNNCSLIIFPNNTEIFNRTYRLVYLDKKINYTVKLLKSVDSPTITYNCTNSLITCKNNNGTNVNIYLIINNTIVNDTNGDILNYYWNGNNNFTATCMINNTISSLNETENINCTNPILKYQNYLSTLFYIIIFIVSGLIIGIFISIISVLSIRRKRKKHVEEIESPPPSESNEEDISHDDTTSIHEPSPREPLLPKPYSRYQYNTPIYYMRPSTQPLNPFPLPKPCPPPKPCPPPKPCPPPKPCPPPKPCSPPKPCRPPKPCPPPKPCPPPKPCPPPKPCPPSKPCPSPESYSPPKPLPSIPLLPNIPPLSTQNISLIHVDRII

SEQ ID NO: 32 - protein, 402 aa, African swine fever virus
MIIIVIFLMCLKIVLNNIIIWSTLNQTVFLNNIFTINDTYGGLFWNTYYDNNRSNFTYCGIAGNYCSCCGHNISLYNTTNNCSLIIFPNNTEIFNRTYELVDLDKKINYTVKLLKSVDSPTITYNCTNSLITCKNNNGTNVNIYLIINNTIVNDTNGDILNYYWNGNNNFTATCMINNTISSLNETENINCTNPILKYQNYLSTLFYIIIFIVSGLIIGIFISIISVLSIRRKRKKHVEEIESPPPSESNEEDISHDDTTSIHEPSPREPLLPKPYSRYQYNTPIYYMRPSTQPLNPFPLPKPCPPPKPCPPPKPCPPPKPCPPPKPCSPPKPCRPPKPCPPPKPCPPPKPCPPPKPCPPSKPCPSPESYSPPKPLPSIPLLPNIPPLSTQNISLIHVDRII

SEQ ID NO: 33 - protein, 360 aa, African swine fever virus
MIILIFLIFSNIVLSIDYWVSFNKTIILDSNITNDNNDINGVSWNFFNNSFNTLATCGKAGNFCECSNYSTSIYNITNNCSLTIFPHNDVFDTTYRVVWNQIINYTIKLLTPATPPNITYNCTNFLITCKKNNGTNTNIYLNINDTFVKYTNESILEYNWNNSNINNFTATCIINNTISTSNETTLINCTYLTLSSNYFYTFFKLYYIPLSIIIGITISILLISIITFLSLRKRKKHVEEIESPPPESNEEEQCQHDDTTSIHEPSPREPLLPKPYSRYQYNTPIYYMRPSTQPLNPFPLPKPCPPPKPCPPPKPCPPPKPCPSAESYSPPKPLPSIPLLPNIPPLSTQNISLIHVDRII

SEQ ID NO: 34 - protein, 198 aa, African swine fever virus
MIIIVIFLMCLKIVLNNIIIWSTLNQTVFLNNIFTINDTYGGLFWNTYYDNNRSNFTYCGIAGNYCSCCGHNISLYNTTNNCSLIIFPNNTEIFNRTYELVYLDKKINYTVKLLKSVDSPTITYNCTNSLITCKNNNGTNVNIYLIINNTIVNDTNGDILNYYWNGNNNFTATCMINNTISSLNETENINCTNPILKY

SEQ ID NO: 35 - DNA, 357 bp, African swine fever virus
atgttggtaatctttttgggaattcttggccttctggccagccaggtctcaagtcaaccagatggacaacttcgtccaacagaggatcctccagaagaagaacttaaatattggtgcacctacatggaaagttgccagttttgttgggactgccaagatggcaattgtataaacaaagtagatgggtcagtcatttataaaaatgagtttgtgcgaccatgttcagtttcccgctggatgaataaatgtatgtatgatttaaataagggtatctatcatacaatgaattgttctcagccacagtcttggaatccctacaaatacttcaggaaggagtggaaaaaagatgaactctag

SEQ ID NO: 36 - DNA, 357 bp, African swine fever virus
atgttggtgatctttttgggaattcttggccttctggccagccaggtctcaagtcagccagttggacaacttcgtccaacagaggaccctccagagaatgaactcgaatattggtgcacctacatggaaagttgccagttttgctgggactgtcaagatggcaattgtataaacaaagtagatgggtcagtcatttataaaaatgagtatgtgcaaccatgttcagtttcccgctggctaaataaatgtatgtatgatttagataagggtatctatcatacaatgaactgttctcagccacggtcttggaatccctacaaatgtttcaggaaggagtggaaaaaagatgaactctag

SEQ ID NO: 37 - DNA, 369 bp, African swine fever virus
atgttggtgatctttttgggaattcttggccttatggccagccaggtcttagggctaccatctaatcaaccaactggacaacttcgtccaacagaggatcctccagaggaagaactcgaatactggtgtgcctacatggaaagttgccagttttgctgggactgccaagatggcaattgcataaacaaaatagatgggtcagtcatttataaaaatgagtttgtgcgaccatgttcagtttcccgctggatggataaatgtatgtatgatttaaataagggtatctatcatacaatgaattgttctcagccacagtcttggaatccctacaaatacttcaggaaggagtggaaaaaagatgaactctag

SEQ ID NO: 38 - DNA, 357 bp, African swine fever virus
atgttggtgacctttttgggaattcttggccttctggccagccaggtctcaagtcagctcgttggacaacttcgtccaacagaggatcctccagaggaagaactcgaatactggtgcgcctacatggaaagttgccagttttgctgggactgccaagatggcaattgtataaacaaaatagatgggtcagtcatttataaaaatgagtatgtgcgaccatgttcagtttcccgttcgatggataaatgtatgtatgatttaaataagggtatctaccatagcatgagctgttctgacccaaaggcctggaatccctacaaatacttcaggaaggaatggaaaaaagatgaactctag

SEQ ID NO: 39 - DNA, 357 bp, African swine fever virus
atgttggtgatctttttgggaattcttggccttctggccagccaggtttcaagtcaactcgttggacaacttcgaccaacagaggatcctccagaggaagaactcgaatactggtgcgcctacatggaaagttgccaattttgctgggactgccaagatggcacttgtataaacaaaatagatgggtcagtaatttacaagaatgagtatgtgaaagcatgtctggtttcccgttggctggataaatgtatgtatgatttagataaaggtatctaccataccatgaattgttctcagccatggtcttggaatccttacaaatacttcaggaaggaatggaaaaaagatgaactctag

SEQ ID NO: 40 - DNA, 357 bp, African swine fever virus
atgttggtgatcttcttgggaattcttggccttctggccagccaggtttcaagtcagctcgttggacaacttcgtccaacagaggatcctccagaggaagaactcgaatactggtgcgcctacatggaaagttgccaattttgctgggactgccaagatggcacttgtataaacaaaatagatgggtcagtaatttacaagaatgagtatgtgaaatcatgtctggtttcccgttggctggataaatgtatgtatgatttagataaaggtatctaccataccatgaattgttctcagccatggtcttggaatccttacaaatacttcaggaaggaatggaaaaaagatgaactctag

SEQ ID NO: 41 - DNA, 357 bp, African swine fever virus
atgttggtgatcttcttgggaatttttggccttctggccagccaggtttcaagtcagctcgttggacaacttcgtccaacagaggatcctccagaggaagaactcgaatactggtgtgcctacatggaaagttgccaattttgctgggactgccaagatggcacttgtataaacaaaatagatgggtcagtaatttacaagaatgagtatgtgaaatcatgtctggtttcccgttggctggataaatgtatgtatgatttagataagggtatctaccataccatgaattgttctcagccatggtcttggaatccttacaaatacttcaggaaggaatggaaaaaagatgaactctag

SEQ ID NO: 42 - DNA, 357 bp, African swine fever virus; identical to SEQ ID NO: 40

SEQ ID NO: 43 - DNA, 357 bp, African swine fever virus
atgttggtgatcttcttgggaattcttggccttctggccagccaggtttcaagtcagctcgttggacaacttcgaccaacagaggatcctccagaggaagaactcgaatactggtgcgcctacatggaaagttgccaattttgctgggactgccaagatggcacttgtataaacaaaatagatgggtcagtaatttacaagaatgagtatgtgaaatcatgtctggtttcccgttggctggataaatgtatgtatgatttagataaaggtatctaccataccatgaattgttctcagccatggtcttggaatccttacaaatacttcaggaaggaatggaaaaaagatgaactctag

SEQ ID NO: 44 - DNA, 375 bp, African swine fever virus
atgaaggtgctgattctagtactactgggggtcgttatccttcaggctgctcctatacgtaaattagaagacctactgccaacccgtaatcctccccaaaatgagctagtttactggtgcacctacgcaaaccaatgtgacttttgctgggaatgtgtacacggaatctgccgaaacagaattcaagcagattggcctgtgattcaccaaaatgactggattataaattgcaccgtttcccgctggaatggtatatgtaggtattatgaaggacccagagtccatatagatcatgaaatggactgtgcaaatccaacatcccatacttatccacacattgaatacatgaagatctatgaaagagatgacctatga

SEQ ID NO: 45 - DNA, 375 bp, African swine fever virus
atgaaggtgctgattctagtactactgggggtcgttatccttcaggctgctcctatacgtaaattagaagacctactgccaacccgtaatcctccccaaaatgagttagtttattggtgcacctacgcaaaccaatgtgatttttgctgggaatgtatacacggaatctgccgaaacagaattcaagcagattggcctgtgattcaccaaaatgactggattataaattgcaccgtttcccgctggaatggtatatgtaggtattatgaaggacccagaggccatatagatcatgaaatggactgtgcaaatccaacataccatacttatccacacattgaatacatgaagatttatgtaagagatgacctatga

SEQ ID NO: 46 - DNA, 375 bp, African swine fever virus
atgaaggtgctgattctagtactgctggcggtggttatccttcaagccgctcctatacgtaaattagaagatctactaccaacccgttatcctcctgaccatgagctagtttattggtgcacctacgcaaaccaatgtgacttttgctgggaatgcgtacacggtatctgccgaaataggattcaagcagattggccggttattcaccaaaatgactggattataaattgcacggtttcccgctggaatggtatatgtagttattatgaaggacccagaaaccatacagatcatcaaatggactgtgcaaatccaacatcccatacctatccacatagagaatacatgaaaatttatgaaagagatgacttataa

SEQ ID NO: 47 - DNA, 381 bp, African swine fever virus
atgaaggtgctgattctagtactactggggggggggggtattattcttcaggccgctcctatacgtaaattagaagatctactaccaacccgttatcctcctgaacatgagctggtttattggtgcacctacgcaaaccaatgtgacttttgctgggaatgcgtccacggtatttgccgaaacaggattcaagcagattggccggttattcatcaaaatgactggattataaattgcacggtttcccgctggaatggccaatgtcattattatgaaggttctcaacaatatctacatcatgaaatggactgtacaaatccaacatcccatacctatccacatacagaatacatgaagatctatgaaagagatgacttatga

SEQ ID NO: 48 - DNA, 375 bp, African swine fever virus
atgaaggtgctaattctagtactactgggggtggttatccttcaggccgctcctatacgtaaattagaagatctactaccaacccgttatcctcctgaacatgagctagtttattggtgcacttacgcaaaccaatgtgacttttgctgggaatgcgtccacggtatctgccgaaacaggattcaagcagattggccagttattcatcaaaatgactggattataaattgcacggtttcccgctggaatggtatatgtagttattatgaaggacccagaaaccatacagatcatcaaatggactgtgcaaatccaacatcccatacttatccacatagagaatacatgaagatctatgaaagagatgacttatga

SEQ ID NO: 49 - DNA, 375 bp, African swine fever virus
atgaaggtgctaattctagtactactgggggtggttattcttcaggccgctcctatacgtaaattagaagatctactaccaacccgttatcctcctgaacatgagctagtttattggtgcacttacgcaaaccaatgtgacttttgctgggaatgcgtccacggtatctgccgaaacaggattcaagcagattggccagttattcaccaaaatgactggattataaattgcacagtttctcgctggaatggtatatgtagttattatgaaggacccagaaaccatacagatcatcaaatggactgtgcaaatccaacatcccatacttatccacatagagaatacatgaagatctatgaaagagatgacttatga

SEQ ID NO: 50 - DNA, 375 bp, African swine fever virus
atgaaggtgctaattctagtactactgggggtggttattcttcaggccgctcctatacgtaaagtagaaaatctactgccaacccgtaatcctccccaaaatgaattagtttattggtgcacctatgcaaaccaatgtgacttttgctgggaatgcattcacggcatctgccgaaacaggattcaagcagattggccagttattcatcaaaatgactggattataaattgcacggtttcccgctggaatggccaatgtcattattatgaaggttctcaacaatatctgcatcatgaaatggactgtataaatccaacatcccatacctatccacatacagaatacatgaagatctatgaaagagatgacttatga

SEQ ID NO: 51 - DNA, 1128 bp, African swine fever virus
ttaccgcaaattgtctctcagcgaagaaaatgaatgaaacgtttctgtatattcataggttgaaattattttacgcacttcactaggttctaatattttcttatgaagtattgaatgggggcttaaaagtcctttcttaaaaagaagtttcatcataacattcttttcttgtctaagaagagtttcttgtattttttttgtataaggattggcacccaaacttatacaaaaatgtacattactccaaataccataatttgaaaagaaagttatttccctatttacttcatgattaatgaaacctatcaacgtctctaaggccgtattgatatttgcgcctaaggcaaaacaatagtatatacccaatttattttgagggtacatacaagcaagcgacatcatgtcatttggatctaaacgtatattttcctgaaaatatgcatgatggatttcatcaacattacctaagtatacagccgtttttaaacgccaataatctaggtgaggaaatttcttactaagaaaacgaataggttttataagattaaactctatggcgatcttaaaccaaaattttaatacatatgtattttttatcattttttctttttcatctaaatttaagataaaacgattgtaaataaagtctatcaacacgtaaaaatcatggctatcaaaactgtcgagaatcgaaatattgtcataataaatatctatagctaataagaccttttgttgtttaattagatcaacaaacatattatacaaccctacatctaaaaattttggatcagctcctagttgaatacacagaactttcgtcctttccgtcttggcacatatgatgccataattaatgttggcaccccataaaacaaataacttgattagatcagtctggtttttcttcacagccctcaccaaggctctgtcaagctcatagctgtcaacatcagaacatgacatagagccactggttaccattttacattgtttacaaaaacctatgggtccgttttcccaccataatccaagctgctgtaaaataaaaatatcatcctcatgataatttgaaaaagccttgttttctatcaagactttttttgtaagaacctgtaaagaattcat

SEQ ID NO: 52 - DNA, 1128 bp, African swine fever virus; identical to SEQ ID NO: 51

SEQ ID NO: 53 - DNA, 1128 bp, African swine fever virus
ttaccgcaaattgtctctcagtaaagaaaatgaatgaaacgtttctgtatattcataggttgaaattattttacgcacttcaccaggttctaatatttttttatgaagtattgaatgggggcttaaaagtcctttcttaaaaagaagtttcattataacattcttttcttgtctaagaagagtttcttgtattttttttgtataaggattggcacccaaacttatacaaaaatgtacattactccaaataccataatttgaaaagaaagttatttccctatttacttcatgattaatgaaacctatcaacgtctctaaggcagtattgatatttgcacctaaggcaaaacaatagtatatacctaatttattctgagggtacatacaagcaagcggcatcatgtcatttggatctaaacgtatattttcctgaaaatatgcatgatggatttcatcaacattacctaagtatacagccgtttttaaacgccaataatctaggtaaggaaatttcttactaagaaaacgaataggttttataagattaaactctatggcgatcttaaaccaaaattttaatacatatgtattttttatcattttttctttttcatctaaatttaagataaaacaattgtaaataaagtctatcaacacgtaaaaatcatggctatcaaacctgtcgagaatcgaaatattatcataataaatatctatagctaataagaccttttgttgtttaattagatcaacaaacatattatacaaccctacatctaaaaattttggatcagctcctagttgaatacacagagctttcatcctttctgtcttggcgcatatgatgccataattaatgttggcaccccataaaacaaataacttgattagatcagtctggtttttcttcacagccctcaccaaggctctgtcaagctcatagctgtcaacgtcagagcatgacatagcgccactagttaccattttacattgtttacaaaaacctatgggaccgttttcccaccatagtccaagctgctgtaaaataaaaatatcatcttcatgatattttgaaaaagccttgttttctatcaagactttttttgtaagaacctgtaaagaattcat

SEQ ID NO: 54 - DNA, 1128 bp, African swine fever virus
ttaccgcaaattgtctctcagcaaagaaaatgaatgaaacgtttccgtatattcataggttgaaattattttacgcacttcactaggttctaatattttcttatgaagtattgaatgggggcttaaaagtcctttcttaaaaagaagtttcattataacattcttttcttgtctaagaagagtttcttgtattttttttgtataaggattggcacccaaacttatacaaaaatgtacattactccaaataccataatttgaaaagaaagttatttccctatttacttcatgattaatgaaacctatcaacgtctctaaggcagtattgatatttgcgcctaaggcaaaacaatagtatatacctaatttattctgagggtacatacaagcaagcgacatcatgtcatttggatctaaacgtatattttcctgaaaatatgcatgatggatttcatcaacattacctaagtatacagccgtttttaaacgccaataatctagatgaggaaatttcttactaagaaaacgaataggttttataagattaaactctatggcgatcttaaaccaaaattttaatacatatgtattttttatcattttttctttttcatctaaatttaagataaaacaattgtaaataaagtctatcaatacgtaaaaatcatggctatcaaaactgtcgagaatcgaaatattatcataataaatatctatagctaataagaccttttgttgtttaattagatcaacaaacatattatacaatcctacatctaaaaattctggattggctcctagttcaatacacaggtctttcgtcctttccgtcttggcacatatgatgccataattaatgttggcaccccataaaacaaacaacttgattagatcagtctggtttttcttcacagcccttaccaaggctctgtcaagctcatagctgtcaacgtcagagcatgacatagagccactggttaccattttacattgtttacaaaaacctatggggccattatgccaccacaatccaagctgctgtaaaataaaaatatcatcctcatgatattctgaaaaagccttgttttctatcaagactttttttgtaagaacctgtaaagaattcat

SEQ ID NO: 55 - DNA, 1128 bp, African swine fever virus; identical to SEQ ID NO: 54

SEQ ID NO: 56 - DNA, 1128 bp, African swine fever virus
ttaccgcaaattgtctctcagcaaagaaaatgaatgaaacgtttccgtatattcgtaggttgaaattattttacgcacttcactaggttctaatattttcttatgaagtattgaatgggggcttaaaagtcctttcctaaaaagaagtttcattataacattcttttcttgtctaagaagagtttcttgtattttttttgtataaggattggcacccaaacttatacaaaaatgtacattactccaaataccataatttgaaaagaaagttatttccccatttacttcatgattaatgtaacgtatcaatgtctctaaggcagtattgatatttgcgcctaaggcaaaacaatagtatatacctaatttattctgagggtacatacaagcaagcggcatcatgtcatttggatctaaacgtatattttcctgaaaatatgcatgatggatttcatcaacattacctaagtatacagccgtttttaaacgccaatcatctaggtgaggaaatttcttactaagaaaacgaataggttttataagattaaactctatggcgatcttaaaccaaaattttaatacatatgtattttttatcattttttctttttcatctaaatttaagataaaacaattgtaaataaagtctatcaacacgtaaaaatcatgactatcaaacctgtcgagaatcgaaatattatcataataaatatctatagctaataagaccttttgttgtttaattagatcaacaaacaaattatacaaccctacatctaaaaattttggatcagctcctagttggatacatagaactttcgtcctttccgtcttggcacatatgatgccataattaatgttggcaccccataaaacaaataacttgattagatcagtctggtttttcttcacagccctcaccaaggctctgtcaagctcatagctgtcaacgtcagagcatgacatagagccactggttaccattttacattgtttacaaaaacctatggggccattatgccaccatagtccaagctgctgtaaaataaaaatatcatcttcatgataatttgaaaaagccttgttttctatcaagactttttttgtaagaacctgtaaagaattcat

SEQ ID NO: 57 - DNA, 1128 bp, African swine fever virus
ttactgcaaattgtctctcagcaaagaaaatgaatgaaacgtttctgtatattcataggttgaaattattttacgcacttcattaggttctattattttcttatgaagtattgaatgggggcttaaaagtcctttcttaaaaagaagtttcattataacattcttttcttgtctaagaagagtttcttgtattttttttgtataaggattggcacccaaacttatacaaaaatgtacattactccaaataccataatttgaaaagaaagttatttccctatttccttcatgattaatgaaacctatcaacgtctctaaggcagtattgatatttgcgcctaaggcaaaacaatagtatatacctaatttattctgagggtacatacaagcaagcgacatcatgtcatttggatctaaacgtatattttcttgaaaatatgcatgatggatttcatcaacattacctaagtatacagccgtttttaaacgccaatcatctaggtgaggaaatttcttactaagaaaacgaataggttttataagattaaactgtatggcgaacttaaaccaaaattttaatacaagtgtattttttgtcatttcttctttttcatctaagtataggataaaacgattgtacataaagtctatcaacacgtaaaaatcatggctatcaaaactgtcgagaatcgaaacattatcataataaatatctatagctaataagaccttttgttgtttaagtagatcaacaaacatattatacaaccctacatctaaaaattttggatcagctcctagttgaatacacagaactttcgtcctttccgtcttggcacatatgatgccataattaatgttggcaccccataaaataaataacttgattagatcagtctggtttttcttcacagccctcaccaaggctctgtcaagctcatagctgtcaacgtcagagcatgacatagagccactggttaccattttacattgtttacaaaaacctatggggccattatgccaccatagtccaagctgctgtaaaataaaaatatcatcttcatgatattctgaaaaagccttgttttctatcaagactttttttgtaagaacctgtaaagaattcat

SEQ ID NO: 58 - DNA, 1128 bp, African swine fever virus
ttatcgtaaattgtctcttagcgaagaaaatgaatgaaccgtttccgtatattgataggttgaaattattttacgcacttcactaggttctaatattttcttatgaagtattgaatgggggcttaaaagtcctttcttaaaaagtagtttcattataacattcttttcttctctaagaagagtttcttgtattttttttgtataaggattggcacccaaacttatacaaaaatgtacattactccaaataccataatttgaaaagaaagttatttccctatttacttcatgattaatgaaacgtatcaacgtctctaaggcagtattgatatttgcccctaaggcaaaacaatagtatatacctaacttattttgagggtacatacaagcaagcgacatcatgttatttggatctaaacgtatattttcctgaaaatatgcatgatggatttcatcaacattacctaagtatacagccgtttttaaacgccaatgatctaggtgaggaaatttcttactaagaaaacgaataggttttataagattaaactctatcgcgaacttataccaaaattttaatacaagtgtatttcttgtcatttcttctttttcatctaaatttaagataaaacgattgtaaataaagtctatcaacgtgtaaaaatcatggtcatcaaaactatcgagaatcgaaatattatcataataaatatctatagctaataagactttttgttgtttaagtagatcaacaaacatattatacaaccctacatctaaaaattttggatcagctcctagttgaagacacagaacttttgtcctttccgtcttggcacacataatgccataattaacgttggcaccccataaaacaaataacttgattagatcagtctggtttttcttcacagccgtcaccaaggctctgtcaagctcatagctgtcaacatcagagcatgacatagagccactggttaccattttacattgtttacaaaaacctatggggccatcatgccaccacaaccctagctgctgtaaaataaaaatatcatcctcatgataatttgaaaaggccttggtttctatcaagactttttttgtaagaacctgtaaagaattcat

SEQ ID NO: 59 - DNA, 1128 bp, African swine fever virus
ttaccgcaaattgtctctcagcgaagaaaatgaatgaaacgtttccgtatattcataggttgaaattattttacgcacttcaccaggttctaatatttttttatgaagtattgaatgggaggttaaaagtcctttcttaaaaaagagtttcattataacattcttttcttctctaagaagagtttcttgtattttttttatataaggattggcacccaaacttatacaaaaatgtacattactccaaataccataatttgaaaagaaagttatttccctatctacttcatgattaatgaaacgtatcaacgtctctaaggcagtattgatatttgcacctaaggcaaaacaatagtatatacctaatttattttgagggtacatacaagcaagcgacatcatgtgatttggatctaaacgtatattttcctgaaaatatgcatgatggatttcatcaacattacctaagtatacagccatttttaaacgccaatcatctaggtgaggaaatttcttactaagaaaacgaataggttttataagattaaactctatggcgatcttaaaccaaaattttaatacaagtgtatttcttgtcatttcttctttttcatctaagtataggatataacgattgtaaataaagtttatcaatgcgtaaaaatcatggctatcaaaactgtcgagaatgggaatgttttcataataaatatctatagctaataagaccttttgttgtttaaatagatcaacaaacatagtatacaaccctacctctaaaaatgttggatcagctcctagttgaatacacagaactttcgtcctttccatcttggcacatatgatgccataattgatgttggcaccccataaaacaaataacttgattagatcagtctgatttttctttacagccttcaccaaggctctgtcaagctcatagctgtcaacgtcagagcatgacatagagccactggttaccattttacattgtttacaaaaacctataggtccgttttcccaccataattctagctgctgtaaaataaaaacatcatcttcatgataatttgaaaaagccttgttttctatcaagactttttttgtaagaacctgtaaagaattcat

SEQ ID NO: 60 - DNA, 1122 bp, African swine fever virus
ttaccgcacattgtctctcagcgaagaaaatgaatgaaacgtttccgtatattgataggttgaaattattttacgcacttcactaggttctaatattttcttatgaagtattgaatgggggcttaaaagtcctttcttaaaaagtagtttcattatatcatacttttcttctctaagaagaatttcttgtattttttttgtataaggattggcacccaaacttatacaaaaatgtacattactccaaataccataatttgaaaagaaaggtctatttagttcatgattaatgaaacgtatcaacgcctctaaggcagtattgatatttgcccctaaggcaaaacaatagtatatacctaatttattctgaggatacatacaagcaagcgacatcatgtgatttggatctaaacgtatattttcctgaaaatatgcatgatggatttcatcaacattccctaagtatacagccgtttttaaacgccaatcatctaggtgaggaaatttcttaccaagaaaacgaataggttttacaagattaaactctatggcaaacttataccaaaattttaatacaagtgtattttttgttattttttctttttcatctaaatttaagataaaaccattgtaaataaagtctatcaacacgtaaaaatcatggctatcaaaactgtcgagaatcgaaatattatcataataaatatctatagctaataagaccttttgttgtttaattagatcaacaaacatattatacaaccctacatctaaaaattttggatcagctcctagttgaatacatagaactttcgtcctttccgtcttggcacacacgatgccaaaattaatttcggcgccccataaaacaaataacttgattagatcagtttggttttccttcacagcttttactaaggctctgtcaagctcatagctgtcgacatcagaacatgacatagagccaccggttaccattttacattgtttacaaaaacctatgggtccgttttcccaccacagtccaagctgctgtaaaatgaaactatcatcttcatgataatttgaaaaagccttgttttctatcaagactttttttgtaagaacctgtaaagagttcat

SEQ ID NO: 61 - DNA, 1128 bp, African swine fever virus
ttaccgcaaattatctctcagtgaagaaaatgaatgaaacgtttccgtatgttcataggttgaaattattttacgcacctcactaggttctaatatttttttatgaagtattgaatgggggcttaaaagtccttttttaaaaagtagtttcattataacattcttttcttctctaagaagagtttcttgtattttttttgtatcagggttggcacccaaacttatacaaaaatgtatattactccaaataccataatttgaaaagaaagttatttccctatttacttcatgattaatgaaacgtatcaacgtctctaaggcagtattgatatttgcgcctaaggcaaaacaatagtatatacctaatttattctgagggtacatacaagcaaacgacatcatgtgatttggatctaaacgtatattttcttgaaaatatgcatgatggatttcatcaacattccctaagtatacagccgtttttaaacgccaatcatctaggtgaggaaatttcttactaagataacggataggttttacaagattaaactctatggcgaacttaaaccaaaattttaatacaaatgtgtttcttgtcattttttctttttcatctaaatttaggataaaacgattgtaaataaagtttatcaacgcgtgaaaatcatggctattaaagctgtcgagaatcaaaatattatcataataaatatctatggctaataagaccttttgttgtttaattagattaacaaacatattatacagctttttatctaaaaattctggatcggctcctagttgaatacacaggtctttcgtcctttccatcttagcacacataatgccataattaatgttggcaccccataaaacaaataatatgattagatcagtttggttttccttcacagcttttactaaggccctgtcaagctcatagctgtcaacatcagagcatgacattgagccaatggttactattttacattgtttacaaaaacctatggggccgttttcccaccacaatcctagctgctgtaaaataaaactatcatcttcatgataatttgaaaaggccttgttttctattaagactttttttgtaagaacctgtaaagaattcat

SEQ ID NO: 62 - DNA, 1038 bp, African swine fever virus
ctaggccaacatactttttaatttatagttttttaatagatgatatattttgttaggatctgcttcttttaacgttaatagcgaggagtctgcactataaatgtctaatgataaatgatgagatatcaaatagtaattccgttgctctgctagggcctttgcctcttcaaaggcgtcggctcccagatctatacaaaagaacaagttatccatattataaaatcgtacgcaggcaagcatagctgaattaatattagctcctaagagaaaacaataatatatggttaaaaaattgttatcttttgtgcaggccatccgcatcatttcatccacgtccatgcggatcttttccttttcatacaaattatgtaggtcaaacagcttattaaaacaaagagcacagattaaccaccacgtatttagatacttaaaatgttggtaaacataagaaatggcctccctaagattatcctgcaatgccactataaaacagtatatcgttaacatatcaccatccgacatattacttaatatgtcggtgtcttctactaaccttttcaacttccaatatatggatgaccttatttcccttataatgacataggctggaaagggattatcattaaaaagtttaagacataagataatattactgctagtagtgccagggtgtattaatttaaagaacatgtgcataatcttctttttatccacgcggtacttggctcctaattcccagcaaaattctcgaacaggcggcgtattggcgcaaattaacccatagttgatgtctgcgccccattctgtaaacagttttattaactgatagttgttttcctttgtagccaacattagtgccgtattaaggtccaagccgtctgcaaagcttggcagctttatcagcatatgtttgcaatcaagggaaattggggccttataccaccatagtccgcagcgttctaagataacatggtactcaatagatacttgctgtctggctagtacctttttggcgaaggattgtaaggaaggaaacat

SEQ ID NO: 63 - DNA, 1038 bp, African swine fever virus
ctaggccaacatactttttaatttatagttttttaatagatgatatattttgctaggatctgcttcttttaacgttaatagcgaggagtctgcactataaatgtctaatgataaatgatgagatatcaaatagtaattccgttgctctgctagggcctttgcctcttcaaaggcgtcggctcccagatctatacaaaagaacaagttatccatattataaaatcgtacgcaggcaagcatagctgaattaatattagctcctaagagaaaacaataatatatggttaaaaaattgttatcttttgtgcaggccatccgcatcatttcatccacgtccatgcggatcttttccttttcatacaaattatgtaggtcaaacagcttattaaaacaaagagcacagattaaccaccacgtatttagatacttaaaatgttggtaaacataagaaatggcctccctaagattatcctgcaatgccactataaaacagtatatcgttaacatatcaccatccgacatattacttaatatgtcggtgtcttctactaaccttttcaacttccaatatatggatgaccttatttcccttataatgacataggctggaaagggattatcattaaaaagtttaagacataagataatattactgctagtagtgccagggtgtattaatttaaagaacatgtgcataatcttctttttatccacgcggtacttggctcctaattcccagcaaaattctcgaacaggcggcgtattggcgcaaattaacccatagttgatgtctgcgccccattctgtaaacagttttattaactgatagttgttttcctttgtagccaacattagtgccgtattaaggtccaagccgtctgcaaagcttggcagctttatcagcatatgtttgcaatcaagggaaattggggccttataccaccatagtccgcagcgttctaagataacatggtactcaatagatacttgctgtctggctagtacctttttggcgaaggattgtaaggaaggaaacat

SEQ ID NO: 64 - DNA, 1071 bp, African swine fever virus
ttacgacgttgtatcattgatgtgataatccaaataggccaacatactttttgatttatagttgtttaatagatggtatatttttttagggttcgcttcttttagcgtgaatagagagggatctggatgatagatatctaatgacaaacgttgtgatattaaataatagtcccgctgctctgctagggcttttgcctcttcgaaggcattggctcccaagtctatacaaaagaacagattatctatattaaagaactgtatggcagcaagcatggccatattgatatcggcccctaaaataaaacaataatacatcgttaaaaagttattatctttcgtgcaagctatgcgcatcatttcattaatgtctatgcgaatcttttcctgctcatagagataatggaggtcagacagtttattaaaatacagagcacagattaaccaccacgtattcatgtgcttaaaatgttcgtaaaaatacgagacggcctccctaagatcattctgcaaggccaccataaaacaatatatagttagcatatcgccgtccgaaacatcacgtagtaggtcttcatcttctactaacctcctcagcctccaataaagagacgactttatttcccttataatcacataggtaggaaaaggattctcattaaaaagcttatgacataagataatatattgacttgttttgttctctataaatttaaagaacatgtgtatcaccttttttttatccatgcgatagttcgctcctaattcccaacaaaactctcgggtaggctgtgtattggcacaaatgtatccatagttgatgtttgcaccccactccgtgaatagttttattaattgatagttgttttcctttgcagctatcatcaatgccgtattgagatccaggccatccgcaaagtatggcaaccttattaacatgtgtttgcaatcaagtgaaattggagccgtataccaccataacccgcagtatttcaaaatatgatagtagtcttcaggcagcacatgctgactggctaatatctttttggcgaaagactgtaaagaaggaaacat

SEQ ID NO: 65 - DNA, 1071 bp, African swine fever virus
ttacgacgttgtatcattattgtgataatccaaataggccgacatactttttgatttataattgtttaatagatggtatatttttttagggttcgcttcttttagcgtgaatagagagggatctggatgatagatatctaatgacaaacgatgtgatattaaataatagtcccgctgctctgctagggcttttgcctcttcgaaggcattggcccccaagtctatacaaaagaacagattatctatattaaaaaactgtatggcagcaagcatcgccatattgatatcggcccctaaaataaaacaataatacatcgttaaaaagttgttatctttcgtgcaagctatgcgcatcatttcattaatgtctatgcgaattttttcctgctcatagagataatggaggtcaaacagtttattaaaacacagagcacagattaaccaccacgtattcaggtgcttaaaatgttggtaaaaatacgagacggcctccctaagaccattctgcaaggccaccataaaacaatataaagttagcatatcgccgtccgaaacatcgcgtagtaggtcttcgtcttctactaacctcctcagcctccaataaagagacgactttatttcccttataatcacataggtaggaaaaggattctcattaaaaagcttatgacataagataatatattgactcgttttgttctctataaatttaaaaaacatatgcatcaccttttttttatctaagcgatagttcgctcctaattcccaacaaaactctcgagtaggctgtgtattggcacaaatgtatccatagttgatgtttgcaccccactccgtgaacagttttattaattgatagttgttttcctttgcagctatcatcaatgccgtattgaggtccaggccatccgcaaagtatggcaaccttattaacatgtgtttacaatcaagtgaaattggagccttataccaccataacccgcagcgcttcaaaatatgatagtagtcttcaggcagcacatgctggctggctaatatctttttggcgaaagattgcagggaaggaaacat

SEQ ID NO: 66 - DNA, 1071 bp, African swine fever virus
ttacgacgttgtatcattaatgtgataatccaaataggccgacatactttttgatttatagttgtttaatagatggtatatttttttagggttcgcttcttttagcgtgaatagagagggatctggatgatagatatctaatgacaaacgatgtgatattaaataatagtcccgctgctctgctagggcttttgcctcttcgaaggcattggcccccaagtctatacaaaagaacagattatccatattaaagaactgtatggcagcaagcatggccatattgatatcggcccctaaaataaaacaataatacatcgttaaaaagttgttatctttcgtgcaagctatgcgcatcatttcattaatgtctatgcgaattttttcctgctcatagagataatggaggtcaaacagtttattaaaacacagagcacagattaaccaccacgtattcaggtgcttaaaatgttggtaaaaatacgagacggcctccctaagatcattctgcaaggccaccataaaacaatataaagttagcatatcgtcgtccgaaacatcgcgtagtaggtcttcgtcttctactaatctcctcagcctccaataaagagacgactttatttcccttataatcacataggtaggaaaaggattctcattaaaaagcttatgacataagataatatactgactcgttttgttctctataaatttaaaaaacatatgcatcaccttttttttatctaagcgatagtttgctcctaattcccaacaaaactctcgagtaggctgtgtattggcacaaatgtatccatagttgatgtttgcaccccactccgtgaacagttttattaattgatagttgttttcctttgcagctatcatcaatgccgtattgaggtccaggccatccgcaaagtatggcaaccttattaacatgtgtttacaatcaagtgaaattggagccttataccaccataacccgcagcgcttcaaaatatgatagtagtcttcaggcagcacatgctggctggctaatatctttttggcgaaagattgcagggaaggaaacat

SEQ ID NO: 67 - DNA, 1071 bp, African swine fever virus
ttataacgatgtatcattgatgtcataattcaaataggccaacatactttttgatttatagttttttaatagacgatatattttgttaggatctgcttcttttaacgttaatagcgaggagtctggactataaatgtctaatgataaacgatgagatatcaaatagtaattctgttgctctgccaaggcttttgcctcttcaaaggcatcggcccccagatctatacaaaagaacaggttatccatattatagaatcgtatggaggcaatcatggccaaattaatattagctcctaagataaaacaataatatatagttaaaaaattgttatcttttgtgcaggctatccgcatcatttcatccatgtccatacggattttttctttttcgtacaaattatgtaggtcaaacagcttattatagcaaagagcacatgttaaccaccacgtattcagatacttaaaatgttggtaaacataagaaatggcctccctaagattatcctgcaatgccacgataaaacagtatatagttaacatatcaccatccgaaatattacttaatacgttggtatcttctgctaaattttttagcttccaatgtatacacgactttatttcccttataatgacataggctgaaaagggattgtcattaaaaaatttaagacataagataatattattactagtagtgttaggatgtattaatttaaagaatatgtgcataatcttctttttatccacttggtacttggctcctaattcccagcaaaattctcgaataggtggcgtattcgcgcaaattaacccatagttgatgtctgcgccccaatccgtaaacatttttattaattgatagttgttttcctttgtagccaacattagtgccgtattaaggtccaagccatctgcaaagtttggcagctttatcagcatatgtttgcaatcaagtgaaattggagccttataccaccatagcccgcagcgttctaagataacatggtaatcaatagatacatgctgactggctaatacctttttggcgaaggattgcaaggaaggaaccat

SEQ ID NO: 68 - DNA, 1071 bp, African swine fever virus; identical to SEQ ID NO: 67

SEQ ID NO: 69 - DNA, 1071 bp, African swine fever virus
ttataacgatgtatcattgatgtcataattcaaataggccaacatactttttgatttatagttttttaatagacgatatattttgttaggatctgcttcttttaacgttaatagcgaggagtctggactataaatgtctaatgataaacgatgagatatcaaatagtaattctgttgctctgccaaggcctttgcctcttcaaaggcatcggcccccagatctatacaaaagaacaggttatccatattatagaatcgtatggaggcaatcatggccaaattaatattagctcctaagataaaacaataatatatagttaaaaaattgttatcttttgtgcaggctatccgcatcatttcatccatgtccatacggattttttctttttcgtacaaattatgtaggtcaaacagcttattatagcaaagagcacatgttaaccaccacgtattcaaatacttaaaatgttggtaaacataagaaatggcctccctaagattatcctgcaatgccacgataaaacagtatatagttaacatatcaccatccgaaatattacttaatacgttggtatcttctgctaaattttttagcttccaatgtatacacgactttatttcccttataatgacataggctgaaaagggattgtcattaaaaaatttaagacataagataatattactactagtagtgctaggatgtattaatttaaagaatatgtgcataatcttctttttatccacttggtgcttggctcctaattcccagcaaaattctcgaataggtggcgtattcgcgcaaattaacccatagttgatgtctgcgccccaatccgtaaacatttttattaattgatagttgttttcctttgtagccaacattagtgccgtattaaggtccaagccatctgcaaagtttggcagctttatcagcatatgtttgcaatcaagtgaaattggagccttataccaccatagcccgcagcgttctaagataacatggtgatcaatagatacatgctgactggctaatacctttttggcgaaggattgcaaggaaggaaacat

SEQ ID NO: 70 - DNA, 1071 bp, African swine fever virus
ttataacgttgtattattgacgtcataattcaaataggccaatatactttttgatttatagttttttaatagatgatatattttgttaggatccgcttcttttaacgttaataacgaggaatctggactataaatgtctaatgataaacaatgagatatcaaaaagtaattccgttgctctgccagggcttttgcctcctcaaaggcatcggcccccaggtctatacaaaagaataagttatctatgttatagaattgtatggaggcaatcatagctaaattaatattagctcctaagataaaacaataatatatggttaaaaaattgttatcttttgtgcaggctatccgcatcatttcatccatgtccatgcggatcttttccttttcatacaaatgatgtaggtcaaacaccttattatagcaaagaacacatgttaaccaccacgtattcagatacttaaaatgttggtaaacataagaaatggcctccctaagattatcctgcaatgccacgataaaacagtatatagttaacatatctccatccgaaatattacttaatacgttggtatcttctgctaacttttttagcttccaatgtatacacgactttatttcccttataatgacataggctgaaaagggattgtcattaaaaagtttaagacataagataatattactactagtagtgctaggatgtattaatttaaagaatatgtgcataatcttctttttatccacttggtacttggctcctaattcccagcaaaattctcgaacaggtggcgtattcgcgcaaattaacccatagttgatgtctgcgccccaatccgtaaacatttttattaattgatagttgttttcctttgtagccaacattagtgccgtattaaggtccaagccatctgcaaagtttggcagctttatcagcatatgtttgcaatcaagtgaaattggagccttataccaccatagcccgcagcgttctaagataatatggtgatcaatggatacatgctgtctggctagtacctttttggcgaaggattgtaaggaaggaaacat

SEQ ID NO: 71 - DNA, 1071 bp, African swine fever virus
ttataacaatgtatcattgatatcatcattcaaataggccaacatattttttgatttatagttttttaatagatgatttattttgttaggatctgtttcttttaacgttaatagcaaggagtctggcttataaatgtctaatgataaacgatgagatattaaatagtaattccgttgctctgccagggcttttgcctcttcaaaggcgtcggctcccagatctatacaaaagaacaagttatccatattataaaatcgtacgcaggcaagcatagctgaattaatattagctcctaagagaaaacaataatatatagttaaaaaattgttatcttttgtgcaggccatccgcatcatttcatccacgtccatgcggatcttttccttttcatacaaattatgtaggtcaaacagcttattaaaacaaagagcacagattaaccaccacgtatttagatacttaaaatgttggtaaacataagaaatggcctccctaagattatcctgcaatgccactataaaacagtatatcattaacatatcaccatccgacatattacttaatatgtcggtgtcttctactaaccttttcagcttccaatatatggatatccttatttcccttataatgacataggctggaaagggattatcattaaaaagtttaagacataagataatattactgctagtagtgccaggatgtattaatttaaagaacatgtgtataatcttctttttatccacgcggtgcttggctcctaattcccagcaaaattctcgaacagacggcgtattggcgcaaattaacccatagttgatgtctgcgccccattccgtaaacagttttattaactgatagttattttcctttgtagccaacattagtgccgtattaaggtccaagccgtctgcaaagcttggcagctttatcagcatatgtttgcagtcaagtgaaattggagccttataccaccatagtccgcaacgttctaagataacatggtactcaatagatacttgctgtctggctagtacctttttggcgaaggattgtaaggaaggaaacat

SEQ ID NO: 72 - DNA, 1062 bp, African swine fever virus
tcatattgtatcatcatggttaaaatatgccgtcatattttttgatttatagttttttaatagatgatatattttgttagggtccgcttcttttaacgttaatagcgaggagtctggactataaatgtctaatgataaacgatgagatatcaaaaagtaattccgttgctctgccagggcttttgcctcttcaaaggcatcggcccccaagtctatacaaaagaacaggttatccatattataaaatcgtatggaggcaatcatggccaaattaatattagctcctaagataaaacaataatatatagttaaaaaattgttatcttttgtgcaggctatccgcatcatttcatccatgtccatgcggattttttccttttcgtacaaattatgtaggtcaaacagcttattaaaacaaagagcacagattagccaccacgtattcagatatttaaaatgttggtaaacataagaaatggcctccctaagattatcctgcaatgccaccataaaacagtatatcgttaacatatcaccatccgaaatattacttaatacgtcggtgtcttctactaactttttcagcttccaatatatggatgactttatttcccttataatgacataggctgaaaaggggttatcattaaaaagtttaagacataagataatattactgctagtagtgccaggatgtattaatttaaagaacatgtgcataatcttctttttatccacgcggtacttggctcctagttcccagcacaattctcgaacaggcggcgtattggcgcaaattaacccatagttgatgtctgcgccccattccgtaaacagttttattaactgatagttgttttcctttgtagccaacattagtgccgtattaaggtccaagccatctgcaaagcttggcagctttatcagcatatgtttgcaatcaagggaaattggagccttataccaccatagtccgcagcgttctaagataacatggtaatcaatagatacatgctgtctggctagtacctttttggcgaaggattgtaaggaaggaaacat

SEQ ID NO: 73 - DNA, 1062 bp, African swine fever virus
tcatattgtatcatcatggttaaaatatgccgtcatattttttgatttatagttttttaatagatgatatattttgttagggtccgcttcttttaacgttaatagcgaggagtctggactataaatgtctaatgataaacgatgagatatcaaaaagtaattccgttgctctgccagagcctttgcctcttcaaaggcgtcggcccccaggtctatacaaaagaacaggttatccatattatagaatcgtatggaggcaatcatggccaaattaatattagctcctaagataaaacaataatatatagttaaaaaattgttatcttttgtgcaggctatccgcatcatttcatccatgtccatgcggattttttccttttcgtacaaattatgtaggtcaaacagcttattaaaacaaagagcacagattagccaccacatattcagatacttaaaatgttggtaaacataagaaatggcctccctaagattatcctgcaatgccaccataaaacagtatatcgttaacatatcaccatctgaaatatcacttaatacgtcggtgtcttctactaactttctcagcttccaatatatggatgactttatttcccttataatgacataggctgaaaaggggttatcattaaaaagtttaagacataagataatattactgctagtagtgccaggatgtattaatttaaagaacatgtgcataatcttctttttatccacgcggtacttggctcctagttcccagcacaattctcgaacaggcggtgtattggcgcaaattaacccatagttgatgtctgcgccccattccgtaaacagttttattaactgatagttgttttcctttgtagccaacattagtgccgtattaaggtccaagccatctgcaaagcttggcagctttatcagcatatgtttgcaatcaagtgaaattggagccttataccaccatagtccgcagcgttctaagataacatggtaatcaatagatacatgctgtctggctagtacctttttggcgaaggattgtaaggaaggaaacat

SEQ ID NO: 74 - DNA, 1068 bp, African swine fever virus
ttacactgtgtcatgcccatcatagtcaaaatataccatcatattttttgatttatagttttttaatagatgatatatttttttaggatctgcttcttttaacgttaatagcgaggagtctggactataaatatctattgataaacgatgatacatcaaaaagtaattccgctggtctgccagggcttttgcctcttcaaaggcatcggctcccaggtctatacaaaagaacaagttatccatattatagaattgtacgcaggcaagcatagcctgattaatattagctcctaagagaaaacagtaatatatggttaaaaagttgttatctttagtgcaggctatgcacatcatttcatccatgtccatgcggatcttttccttttcatacaaatcatgtaggtcaaacagcttattaaaacaaagagcacagattaaccaccacgtattcagatgcttaaaatgttggtaaaaataagaaatggcctccctaagattatcctgcaatgccaggataaaacagtatatagtcaacatatcatcatccgacatattacttaatatgtcagtgtcttctactaaccttctcagcttccaatatatagacgactttatttcccttataatgacataggttggaaaaggattattattaaaaagtttaagacataagataatattactactagtagtgccatgatgtattaatttaaaaaacatatgcataaccttatttttatccacttggtacttggctcctaattcccagcaaaattctcgaacaggcggcgtattagcgcaaattaatccatagttgatgtccgcgccccattccgtaaacagttttattaactgatagttgttttcctttgtagccaacattagtgccgtattaaggtccaagccatctgcaaagcttggcagctttattaacatatgtttgcaatcaagtgaaattggagccttataccaccatagtccgcaatgttttaagatataatgataatcaatggatacatgatgtctagctaatacctttttggcgaaggattgtaaagaaggaaacat

SEQ ID NO: 75 - DNA, 1062 bp, African swine fever virus
ttatctttgttcataatcaagaaaaatccccatatttattgagtgataattttttaacatgcaatttattttttcagggtccgtaacgatcgacaacagagaaataaccggattgtaatgctttaatgataaggcatgggctatcagataattttccttttgttctgccaaagctttgccctcctcaaaggcatcggcacccaggtctatacaaaagaacaggtttccaagattatagttttgtatggaaacaagcatggcttgattgatgttggctcccatgataaaacagtagtaaatggccgaatagctataatcttggatgcaggctatgtgcatcatttcatcaatatccatgcggaccctttctatttcgtacagctcgtgaaggtcgaacacgttgttgtaaaaaagggcgcacatgagccgccacctatgtagacgcgggtatttctggtaaaagtagcggatagcatctttgaggtcatagtccaccgctatcgcgtaccagtatttggttaaaacagtgctaaagctatcatcatggtccagcatgaaggttatctccatgagccctcttaactcccacatgatttcccccctcagatccagattatctataatccttaaattggggttattggaaaacacctcgtggcaaaagataatattgctactggttttatcgcgcgttgtatcaaagaaaatttttaaaatatactctctttctaaatattctttggctcccagctctttgcacagatcacgggtattttccgtgagagcacaaatcattccatagttaatatctgcaccccattcagtaaacagctttatcaagtcatgattattctccttcacggctttcatcagtcctatgtttaactcgataccttgactaaaacaggttgaccttataaataatttattgcgtcgaatatgaagcataatggggccattatgccaccacaggccacaacacttcaggacatgatattgatctaccggtatacactgcccggccagtactttcttcgtgagggattgcagggaaggcaacat

SEQ ID NO: 76 - DNA, 1062 bp, African swine fever virus; identical to SEQ ID NO: 75

SEQ ID NO: 77 - DNA, 1062 bp, African swine fever virus
ttatctttgttcataatcaagaaaaatccccatatttattgagtgataattttttaacatgtaatttattttttcagggtccataacgttcgacaacagagaaatgactggattgtaatgctttaatgataaggcatgggctatcagataattttccttttgttctgccaaagctttgccctcctcaaaggcgttggcgcccaggtctatacaaaagaacaggtttccaagattatagttttgtatggaaaccagcatggcttgattgatgttggctcccatgataaaacagtagtaaatggccgaatagctataatcttggatgcaggctatgtgcatcatttcatcgatatccatgcggaccctttctatttcatacagctcgtgaaggtcgaacacgttgttgtaaaaaagggcgcacatgagccgccaccgatgtaggcgcgggtatttctggtaaaagtagcgaatagcatctttgaggtcatagtccaccgctatagcataccagtatttggttaaaacagtgctaaagctatcatcatggtctagcatgaaggttatctccatgagccctcttaactcccacatgatttcccccctcagatccagattatctataatccttaaattggggttattggaaaacacctcgtggcaaaagataatattgctactggttttatcgcgcgtcgtatcaaagaaaatttttaaaatatactctctttctaaatattctttggctcccagctctttgcacagatcacgggtattttccgtgagagcacaaatcattccatagttaatatctgcaccccattcagtaaacagctttatcaagtcatgattattctccttcacggctttcatcagtcctatgtttaactcgataccttgactaaagcaggttgaccttataaatagtttattacgtcgaatatgaagcataatggggccattatgccaccacaggccacaacacttcaggatatgataatgatccaccgacacgcactgcccggccagtactttcttcgtgagggattgcagggaaggcaacat

SEQ ID NO: 78 - DNA, 1062 bp, African swine fever virus; identical to SEQ ID NO: 77

SEQ ID NO: 79 - DNA, 1062 bp, African swine fever virus
ttatctttgttcataatcaagaaaaatccccatatttattgagtgataattttttaacatgtaatttattttttcagggtccataacgatcgacaacagagaaatgaccggattgtaatgctttaatgataaggcatgggctatcagataatttcccttttgttctgccaaagctttgccctcctcaaaggcgttggcgcccaggtctatacaaaagaacaggtttccaagattatagttttgtatggaaaccagcatagcttgattgatgttggctcccatgataaaacagtagtaaatgaccgaatagctataatcttggatgcaggctatgtgcatcatttcatcaatatccatgcggaccctttctatttcatacagctcgtgaaggtcgaacacgttgttgtaaaaaagggcgcacatgagccgccacctatgtaggcgcgggtatttctggtaaaagtagcgaatagcatctttgaggtcatagtccaccgctatagcataccagtatttggttaaaacagtgctaaagctatcatcatggtctagcatgaaggttatctccatgagccctcttaactcccacatgatttctcccctcagatccagattatctataatccttaaattggggttattggaaaacacctcgtggcaaaagataatattgctactggttttatcgcgcgtcgtatcaaagaaaatttttaaaatatactctctttctaaatattctttggctcccagctctttgcacagatcacgggtattttccgtgagagcacaaatcattccatagttaatatctgcaccccattcagtaaacagctttatcaagtcatgattattctccttcacggctttcatcagtcctatgtttaactcgataccttgactaaagcaggttgaccttataaatagtttattacgtcgaatatgaagcataatggggccattatgccaccacaggccacaacacttcaggatatgataatgatccaccgacacgcactgcccggccagtactttcttcgtgagggattgcagggaaggcaacat

SEQ ID NO: 80 - DNA, 1062 bp, African swine fever virus
ttatctttgttcataatcaagaaaaatccccatatttattgagtgataattttttaacatgcgatttattttttcagggtccgtaaccaccgacaacagagaaatgaccggattgtaatgctttaatgataaggcattggctatcagataatttcccttttgttctgccaaagctttgccctcctcaaaggcgttggcacccaggtctatacaaaagaacaggttcccaagattatagttttgtatggaaaccagcatggcttgattgatgttggctcccatgataaaacagtagtagatggctgaatagctataatcttggacgcaggctatgtgcatcatttcatcaatgtccatgcggaccctttctatttcatacagctcgtgaaggtcgaacacgttgttgtaaaaaagggcgcacatgagccgccacctatgtagccgcgggtatttctggtaaaagtagcggatagcatctttgaggtcatagtccaccgctatcgcgtaccagtatttggttaaaacagtgctaaagctatcatcatggtccagcatgaaggttatctccatgagccctcttaactcccacatgatttcccccctcagatccagattatctataatccttaaattggggttattggaaaacacctcgtggcaaaagataatattgttactggttttatcgcgcgttgtatcaaagaaaatttttaaaatatactctctttctaaatattctttggctcccagctctttgcacagatcacgggtattttccgtgagagcacaaatcattccatagttaatatctgcaccccattcagtaaacagctttatcaagtcatgattattctccttcacggctttcatcagtcctatgtttaactcgataccttgactaaagcaggttgaccttataaatattctattacgtcgaatatgaagcattatggggccattatgccaccacaggccacaacacttcaggatatgataatgatccaccgacacgcactgcccggccagtactttcttcgtgagggattgcagggaaggcaacat

SEQ ID NO: 81 - DNA, 1062 bp, African swine fever virus
ttatctttgttcataatcaagaaaaatccccatatttattgagtgataattttttaacatgcgatttattttttcagggtccgtaaccaccgacaacagagaaatgaccggattgtaatgctttaatgataaggcattggctatcagataatttcccttttgttctgccaaagctttgccctcttcaaaggcgttggcacccaggtctatacaaaagaacaggttcccaagattatagttttgtatggaaaccagcatggcttgattgatgttggctcccatgataaaacagtagtaaatggctgaatagctataatcttggacgcaggctatgtgcatcatttcatcaatgtccatgcggaccctttctatttcatacagctcgtgaaggtcgaacacgttgttgtaaaaaagggcgcacatgagccgccacctatgtagccgcgggtatttctggtaaaagtagcggatagcatctttgaggtcatagtccaccgctatcgcgtaccagtatttggttaaaacagtgctaaagctatcatcatggtccagcatgaaggttatctccatgagccctcttaactcccacatgatttcccccctcagatccagattatctataatccttaaattggggttattggaaaacacctcgtggcaaaagataatattgttactggttttatcgcgcgttgtatcaaagaaaatttttaaaatatactctctttctaaatattctttggctcccagctctttgcacagatcacgggtattttccgtgagagcacaaatcattccatagttaatatctgcaccccattcagtaaacagctttatcaagtcatgattattctccttcacggctttcatcagtcctatgtttaactcgataccttgactaaagcaggttgaccttataaatattctattacgtcgaatatgaagcattatggggccattatgccaccacaggccacaacacttcaggatatgataatgatctaccgacacgcactgcccagccagtactttcttcgtgagggattgcagggaaggcaacat

SEQ ID NO: 82 - DNA, 1062 bp, African swine fever virus
ttatctttgttcataatcaagaaaaatccccatatttattgagtgataattttttaacatgcaatttatttttttagggtctgtaacgaccgacaacagagaaatgaccggattgtaatgctttaatgataaggcatcggctatcagataatttcccttttgttctgccaaagctttgccttcctcaaaggcgttggctcccaggtctatacaaaagaacaggttcccaagattatagttttgtatggaaaccagcatggcttgattgatgttggctcccatgataaaacagtagtaaatggccgaatagctataatcttggacgcaggctatgtgcatcatttcatcaatgtccatgcggaccctttctatttcgtacagctcgtgaaggtcgaacacgttgttgtaaaaaagggcgcacatgagccgccacctatgtagacgcgggtatttctggtaaaagtagcggatcgcatctttgaggtcatagtccaccgctatcgcgtaccagtatttggttaaaacagtgctaaagctatcatcatggtccagcatgaaggttatctccatgagccctcttaactcccacatgatttcccccctcagatccagattatctataatccttaaattggggttattggaaaacacctcgtggcaaaagataatattgttactggttttatcgcgcgtcgtatcaaagaaaatttttaaaatatactctctttctaaatattctttggcacccagctctttgcacagatcacgggtattttccgtgagagcacaaatcattccatagttaatatctgcaccccattcagtaaacagctttatcaagtcatgattattctccttcacggctttcatcagtcctatgtttaactcgataccttgactaaagcaggttgaccttataaatagtttattacgtcgaatctgaagcataatgggtccattatgccaccacaggccacaacacttcaggatatgataatgatccaccgacacgcactgcccggccagtactttcttcgtgagggattgcagggaaggcaacat

SEQ ID NO: 83 - DNA, 1062 bp, African swine fever virus
ttatctttgttcataatcaagaaaaatccccatatttattgagtgataattttttaacatgcgatttattttttcagggtccgtaaccaccgacaacagagaaatgaccggattgtaatgctttaatgataaggcattggctatcagataatttcccttttgttctgccaaagctttgccctcctcaaaggcgttggcccccaggtctatacaaaagaacaggttcccaagattatagttttgtatggaaaccagcatggcttgattgatgttggctcccatgataaaacagtagtaaatggctgaatagctataatcttggacgcaggctatgtgcatcatttcatcaatgtccatgcggaccctttctatttcatacagctcgtgaaggtcgaacacgttgttgtaaaaaagagcgcacatgagccgccacctatgtagccgcgggtatttctggtaaaagtagcggatagcatctttgaggtcatagtccaccgctatcgcgtaccagtatttggttaaaacagtactaaagctatcatcatggtccagcatgaaggttatctccatgagccctcttaactcccacatgatttctccccttagatccagattatctataatccttaaattggggttattggaaaacacctcgtggcaaaagataatattgttactggttttatcgcgcgttgtatcaaagaaaatttttaaaatatactctctttctaaatattctttggctcccagctctttgcacagatcacgggtattttccgtgagagcacaaatcattccatagttaatatctgcaccccattcagtaaacagctttatcaagtcatgattattctccttcacggctttcatcagtcctatgtttaactcgataccttgactaaagcaggttgaccttataaatattctattacgtcgaatatgaagcattatggggccattatgccaccacaggccacaacacttcaggatatgataatgatccaccgatacgcactgcccggccagtactttcttcgtgagggattgcagggaaggcaacat

SEQ ID NO: 84 - DNA, 1062 bp, African swine fever virus
ttatcttcgttcataatcaagaaaaaccctcatatttattgagtgataattttttaacatgcaatttattttttcagggtccataatgaccgacaacagagaaatgaccggattgtaatgctttaatgataaggcatcggctatcagataattttccttttgttctgccaaagctttcccctcctcaaaggcgttggcccccagatctatacaaaagaacatgttcccaagattatagttttgtatagaaacaagcatggcttgattgatgttggcccccatgataaaacagtaataaatagccgcatagctataatcttggacgcaggctatgtgcatcatttcatcaatatccatgcggaccctttctattacatacagctcgtgaaggtcgaacacgttgttgtaaaaaagggcgcacataagccgccagtggtgtagatgggtatacctctgataaaaataatggatagcctttttgaggccatagtctaccgctatggcgtaccagtatttggttaacatattgctaaaggagttgtcatggtccaacatgtaggttatctccatgagtccccttagctcccacatgatttcctccctcagatccaaattatccacatttttcaggttggggttattggaaaacatttcgtggcataagataatattactgtcggttttgttgcgcgtcgtatcaaagaaaatttttaaaatataatctctatctaaacgatctttggctcctagttctctgcatagattacgggtgtgctccgtatgggcacaaatcagtccataattaatatcggcaccccactcggcaaacagccttatcaagtcatggttgttttccttcgcggctttcatcagtacggtgttcaattcaataccctcgctaaaacaggttgaccttataaacattttgtgacgataaacgtaaaatgtaatagggccatcataccaccacaacccgcagcactttaagacatgatattgatctaccggtacacactgtttggccagcactttcttagttaaagattgtaaggaaggcaacat

SEQ ID NO: 85 - DNA, 1062 bp, African swine fever virus
ttatctgcgttcataatcgagaaaaaccaccatattctttgagtgataattttttaacatagaatttatcttttctgggtcggtcacggccgacaacagggaaatcaccgggttataatgttttaatgataaggcatcggctatcaaataattttccttttgtattgctagggttttgccttcttcaaaggcgttggcacccaggtctatacaaaagaacatgttcccgagattatagttttgtatggaaacaaacatggcttgattgatgttggcccccatgataaaacagtagtagatagctgaatagctataatcttggatgcaggctatgtgcatcatctcatcgatatccatgcggaccctttctatttcatacagctcgtgaaggtcgaacacattgttataaaaaagggcgcacataagccgccaccgatgtagatgggtatacttctgataaaaatagtggatggcctttttgaggccgtagtctaccgctatggcgtaccagtatttggttaacatattgctgaaggagttgtcatggtccaacatgtaggttatctccatgagtccccttagctcccacatgatttcctccctcagatccaaatcatccacatgtttcagattggggttattggaaaacatttcgtggcataagataatattactgtcggttttgttgcgcgtcgtatcaaagaaaatttttaaaatatactctctatctaaacggtctttggctccaagttctctgcatagattgcgggtgtgctccgaatgagcacaaaccagtccataattaatatcggcaccccactcaacaaacagccttatcaagtcatgattgttttccttcgcggctttcatcagtacggtgttcaattcaataccctcgctaaaacaggttgactttataaacattttgttacgatacgtataaaatgtaatagggccatcataccaccacaacccgcagcatttcaggatatgatattgatctaccggtatacactgtttggccagcactttcttggatagggattgcaaggaaggcaacat

SEQ ID NO: 86 - DNA, 1062 bp, African swine fever virus
ttatctgcgttcataatcgagaaaaaccaccatattctttgagtgataattttttaacatagaatttatcttttctgggtcggtcacggccgacaacagggaaatcaccgggttataatgttttaatgataaggcatcggctatcaaataattttccttttgtattgctagggctttgccttcttcaaaggcgttggcacccaggtctatacaaaagaacatgttcccgagattatagttttgtatggaaacaaacatggcttgattgatgttggcccccatgataaaacagtagtaaatagctgaatagctataatcttggatgcaggctatgtgcatcatctcatcgatatccatgcggaccctttctatttcatacagctcgtgaaggtcgaacacattgttataaaaaagggcgcacataagccgccaccgatgtagatgggtatacttctgataaaaatagtggatggcctttttgaggccgtagtctaccgctatggcgtaccagtatttggttaacatattgctgaaggagttgtcatggtccaacatgtaggttatttccatgagtccccttagctcccacatgatttcctccctcagatccaaatcatccacatgtttcagattggcgttattggaaaacatttcgtggcataagataatattactgtcggttttgttgcgcgtcgtatcaaagaaaatttttaaaatatactctctatctaaacggtctttggctccaagttctctacatagattgcgggtgtgctccgaatgagcacaaaccagtccataattaatatcggcaccccactcaacaaacagccttatcaagtcatgattgttttccttcgcggctttcatcagtacggtgttcaattcaataccctcgctaaaacaggttgactttataaacattttgttacgatacgtataaaatgtaatagggccatcataccaccacaacccgcagcatttcaggatatgatattgatctaccggtatacactgtttggccagcactttcttggatagggattgcaaggaaggcaacat

SEQ ID NO: 87 - DNA, 1062 bp, African swine fever virus
ttatctgcgttcataatcgagaaaaaccaccatattctttgagtgataattttttaacatagaatttatcttttccgggtcggtcacggccgacaacagggaaatcaccgggttataatgttttaatgataaggcatcggctatcaaataattttccttttgtattgctagggctttgccttcttcaaaggcgttggcacccaggtctatacaaaagaacatgttcccgagattatagttttgtatggaaacaaacatggcttgattgatgttggcacccatgataaaacagtagtaaatagttgaatagctataatcttggatgcaggctatgtgcatcatctcatcgatatccatgcggatcctttctatttcatacagctcgtgaaggtcgaacacattgttataaaaaagggcgcacatgagccgccaccgatgtagatgggtatacttctgataaaaatagtggatggcctttttgaggccgtagtctaccgctatggcgtaccagtatttggttaacatgttgctgaaggagttgtcatggtccaacatgtaggttatctccatgagtccccttagctcccacatgatttcctccctcaggtccaaatcatccacatgtttcagattggggttattggaaaacatttcgtggcataagataatattactgtcggttttgttgcgcgtcgtatcaaagaaaatttttaaaatatactctttatctaaacggtctttggcccctagttctctgcatagatcgcgggtgtgctccgaatgagcacaaaccagtccataattaatatcggcaccccactcagtaaataattttattaggtcatgattgttttccttcgcggctttcatcagtacggtgttcaattcaataccctcgctaaaacaggttgactttataaacattttgttacgatacgtataaaatgtaatagggccatcataccaccacaacccgcaacttttcaggatatgatattgatctaccggtatacactgtttggccagcacttttttggatagggattgcaaggaaggcaacat

SEQ ID NO: 88 - DNA, 1053 bp, African swine fever virus
tcatcttaaatcataggtaaggaagatcatcatattttttgaaacgtaattttttaacgcatgatctatgatttcagggtccgtgcttttaggcaacggggtggtggccggactataaatctttagggataaaatgttctttataagctcatacccttcccctaaagctgtagtaccctcttcgaaaacatcagcccccagatctatacaaaagaacatgttttctatattatagtactgtattgagctaagcatggcttgattgatgttggcgcccaggacatagcagtagtacatggttgaaaggttgtggtctttgatgcaggcgatccgcatcatctcttctatgtccatatggatcttgtccttttcatacgcctcatgaaggtcaaacacattattaaaacaaagagcacatgttaaccgccacgtattcaggtgtgtatatttttggtaaaaatactgtatggcctctttcaggttatagcgtatggctatagcgtaccagtatttgagtagtaatgtactgagcgaaaactcattatttagcagatcggtttttactattaactcccttaactcccagaaaatttctatcctcatttttatattatttactttttgtaatatcggattgttggaaaacacctcatggcataaaataatgttactactagttttatgaaactttagatctataaaaatttgtaaaatttcttcttcattcaaggtttccttggcacctagctctcgacagaggtcccaggtgtgctccgtgttgacagataccagcccgtagttgatgtccgccccccactctgcaaacagttttataaggttgtagttgttttcccttacagccttcactaacgccgtatttaggtttaagccctctttaatacctgctgattttatgagccttaggttatgatcaaacgtgatcggagcatcatgccaccataggtcataacactttaaaagataatgttggttcgtgggcacgcattgtccagccaacacctttttggtcagagattgcagggaaggcaacat

SEQ ID NO: 89 - DNA, 1053 bp, African swine fever virus; identical to SEQ ID NO: 88

SEQ ID NO: 90 - DNA, 1053 bp, African swine fever virus
tcatcttaaatcataggtaaggaagatcatcatattttttgaaacgtaattttttaacgcatgatctatgatttcagggtccatgcttttaggcaacggggtggtggccggactataaatctttagggataaaatgttctttataagctcatacccttcccctaaagctgtagtaccctcttcgaaaacatcagcccccagatctatacaaaagaacatgttttctatattatagtactgtattgagctaagcatggcctgattgatgttggcgcccaggacatagcagtagtacatggttgaaaggttgtggtctttgatgcaggcgatccgcatcatctcttctatgtccatatggatcttgtccttttcatacgcctcatgaaggtcaaacacattattaaaacaaagagcacatgttaaccgccacgtattcaggtgtgtatatttttggtaaaaatactgtatggcctctttcaggttatagcgtatggctatagcgtaccagtatttgagtagtaatgtactgagcgaaaactcattatttagcagatcggttttttctattaactcccttaactcccagaaaatttctatcctcatttttatattatttactttttgtaatatcggattgttggaaaacacctcatggcataaaataatgttactactagttttatgaaactttagatctataaaaatttgtaaaatttcttcttcattcaaggtctccttggcacctagctctcgacagaggtcccaggtgtgctccgtgttgacagataccagcccgtagttgatgtccgccccccactctgcaaacagttttataaggttgtagttgttttcccttacagcctttactaacgccgtatttaggtttaagccctctttaatacctgctgattttatgagccttaggttatgatcaaacgtgatcggagcatcatgccaccataggtcataacactttaaaagataatgttggttcgtgggcacgcattgtccagccaacacctttttggtcagagattgcagggaaggcaacat

SEQ ID NO: 91 - DNA, 1053 bp, African swine fever virus
tcatcttaaatcgtaggtaaggaagatcatcatattttttgaaacgtaattttttaacgcatgatctataatttcagggtccgtgcttttaggcaacggggtggtggccggactataaatctttagggataaaatgttctttataagcttatacccttcccctaaagctatagtgccctcttcgaaagcatcagcccccagatccatacaaaagaacatgttttctatattatagtactgtattgaggtaagcatggcctgattgatgttggcgcccaggacatagcagtagtacatggttgaaaggttgtggtctttgatgcaggcgatccgcatcatctcttctatgtccatatggatcttgtccttttcatacgcctcatgaaggtcaaacacattattaaaacaaagagcacatgttaaccgccacgtattcaggtgtgtatatttttggtaaaaatactgtatggcctctttcaggttatagcgtatggctatagcgtaccagtatttgagtagtaatgcactgagcgaaaactcattatttagcagatcggttttttctattaactcccttaactcccagaaaatttctatcctcatttttatattatttactttttgtaatatcggattgttggaaaacacctcatggcataaaataatgttactactagttttatgaaactttagatctataaaaatttgtaaaatttcttcttcattcaaggtctccttggcacctagctctcgacagaggtcccgggtgtgctccgtgttgacagataccagcccatagttgatgttcgccccccactctgcaaacagttttataaggttgtaattgttttcccttacagccttcactaacgccgtatttaggtctaagccctctttaatgcctgctgattttatgagctttaggttatgatcaaacgtgatcggaccatcatgccaccataggtcataacactttaaaagataatgttggttcgtgggcacgcattgtccagccaacacctttttggtcagagattgcagggaaggcaacat

SEQ ID NO: 92 - DNA, 1053 bp, African swine fever virus
tcatcttaaatcgtaggtaaggaagatcatcatattttttgaaacgtaattttttaccgcatgatctatgatttcagggtccgtgcttttaggcaacggggtggtggccggactataaatctttagggataaaatgttctttataagcttatacccttcccctaaagctatagtaccctcttcgaaagcatcagcccccagatccatacaaaagaacatgttttctacattatagtactgtattgaggtaagcatggcctgattgatgttggcgcccagaacatagcagtagtacatggttgaaaggttgtggtctttgatgcaggcgatccgcatcatctcttctatgtccatatagatcttgtccttttcatacgcctcatgaaggtcaaacacattattaaaacaaagagcacatgttaaccgccatgtattcaggtgtgtatatttttggtaaaaatactgtatggcctctttcaggttatagcgtatggctatagcgtaccagtatttgagtagtaatgtactgagcgaaaactcattatttagcagatcggttttttctattaactcccttaactcccagaaaatttctatcctcatttttatattatttactttttgtaatatcggattgttggaaaacacctcatggcataaaataatgttactactagttttatgaaactttagatctataaaaatttgtaaaatttcttcttcattcaaggtctccttggcacctagctctcgacagaggtcccgggtgtgctccgtgttgacagataccagcccatagttgatgtccgccccccactctgcaaacagttttataaggttgtagttgttttcccttacagccttcactaacgccgtatttaggtctaagccctctttaatgcctgctgattttatgagctttaggttatgatcaaacgtgatcggaccatcatgccaccataggtcataacactttaaaagataatgttggttcgtgggcacgcattgtccagccaacacctttttggtcagagattgcagggaaggcaacat

SEQ ID NO: 93 - DNA, 1053 bp, African swine fever virus
tcatcttaaatcgtaggtaaggaagatcatcatattttttgaaacgtaattttttaacgcatgatctataatttcagggtccgtgcttttaggcaacggggtggtggccggactataaatctttagggataaaatgttctttataagcttatacccttcccctaaagctatagtgccctcttcgaaagcatcagcccccagatccatacaaaagaacatgttttctatattatagtactgtattgaggtaagcatggcctgattgatgttgccccccaggacatagcagtagtacatggttgaaaggttgtggtctttgatgcaggcgatccgcatcatctcttctatgtccatatgaatcttgtccttttcatacgcctcatgaaggtcaaacacattattaaaacaaagagcacatgttaaccgccacgtattcaggtgtgtatatttttggtaaaaatactgtatggcctctttcaggttatagcgtatggctatagcgtaccagtatttaagtagtaatgtactgagcgaaaactcattatttagcagatcggttttttctattaactcccttaactcccagaaaatttctatcctcatttttatattatttactttttgtaatatcggattgttggaaaacacctcatggcataaaataatgttactactagttttatgaaactttagatctataaaaatttgtaaaatttcttcttcattcaaggtctccttggcacctagctctcgacagaggtcccaggtgtgctccgtgttgacagataccagcccatagttgatgttcgccccccactctgcaaacagttttataaggttgtagttgttttcccttacagccttcactaacgccgtatttaggtctaagccctctttaatgcctgctgattttatgagctttaggttatgatcaaacgtgatcggaccatcatgccaccataggtcgtaacactttaaaagataatgttggtttgtgggcacgcattgtccagccaacacctttttggtcagagattgcagggaaggcaacat

SEQ ID NO: 94 - DNA, 1053 bp, African swine fever virus
tcatcttaaatcataggaaaggaagatcatcatattttttgaaaagtaattttttaacgcatgatctatgatttcagggtccgtgcttttaggcaacgggatggtggtcggactataaatctttagagataaaatgttttttataagctcatacccttcccctaaagctgtagtaccctcttcgaaaacatcagcccccagatccatacaaaagaacatgttttctatattatagtactgtattgaggtaagcatggcctgattgatgttggcgcccaacatatagcagtagtacatggttgaaaggttgtggtctttaatgcaggcgatccgcatcatctcttctatgtccatatagatcttgtccttttcatacgcctcatggaggtcaaacacattattaaaacaaagagcacatgttaaccgccacgtattcaggtgtgtatatttttggtaaaaatactgtatggcttctttcaggttatagcgtatggctatagcgtaccagtatttgagtagcaatgtactgagcgaaaactcattatttagcagatcggttttttctattaactcccttaactcccaaaaaatttctatcctcatttttatattatttactttttgtaatatcggattgttggaaaacacctcatggcataaaataatgttactactagttttatgaaactttagatctataaaaatttgtaaaatttctttttcattcaaggtctccttggcacctagctctcgacagaggtcccaggtgtgctccgagctgacagataccagcccatagttgatgtccgccccccactctgcaaacaattttataaggttgtagttgttttcctttacagccttcaccaacgccgtatttaggtctaagccctctttaatgcctgctgattttatgagccttaggttatgatcaaacgtgatcggagcatcatgccaccataggtcataatattttaaaagataatgttggttcgtgggcacgcattgtccggccaacacctttttggtcaaagattgcagggaaggcaacat

SEQ ID NO: 95 - DNA, 1053 bp, African swine fever virus
tcatcttaaatcataggaaaggaagatcatcatattttttgaaaagtaattttttaacgcatgatctatgatttcagggtccgtgcttttaggcaacgggatggtggtcggactataaatctttagagataaaatgttttttataagctcatacccttcccctaaagctgtagtaccctcttcgaaaacatcagcccccagatccatacaaaagaacatgttttctatattatagtactgtattgaggtaagcatggcctgattgatgttggcgcccaacatatagcagtagtacatggttgaaaggttgtggtctttgatgcaggcaatccgcatcatctcttctatgtccatatggatcttgtccttttcatacgcctcatggaggtcaaacacattattaaaacaaagagcacatgttaaccgccacgtattcaggtgtgtatatttttggtaaaaatactgtatggcctctttcaggctatagcgtacggctatagcgtaccagtatttgagtagtaatgtactgagcaaaaactcattatttagcagatcggttttttctattaactcccttaactcccagaaaatttctatcctcaatttcagattatttactttttgtaatatcggattgttggaaaacacctcatggcataaaataatgttactactagttttatgaaactttagatctatgaaaatttgtaaaatttcctcttcattcaagatctccttggcacctaactcttgacagaggtcccgggtatgctccgtgttgacagataccagcccatagttgatgtccgccccccactctgtaaatagttttataaggctgtagttgttttcccttacagcctttactaacgccgtatttaggtctaagccctctttaatgcctgatgattttatgagccttaggttatgatcaaacgtgatcggagcattataccaccatagatcataatattttaaaagataatgttggttcgtgggcacgcattgtccagccaacacctttttggtcaaagattgcagggaaggcaacat

SEQ ID NO: 96 - DNA, 1053 bp, African swine fever virus
tcatcttaaatcataggaaaggaagatcatcatattttttgaaaagtaattttttaacgcatgatctatgatttcagggtccgtgcttttaggcaacgggatggtggtcggactataaatctttagagataaaatgttttttataagctcatacccttcccctaaagctgtagtaccctcttcgaaaacatcagcccccagatccatacaaaagaacatgttttctatattatagtactgtattgaggtaagcatggcctgattgatgttggcgcccaacatatagcagtagtacatggttgaaaggttgtggtctttgatgcaggcaatccgcatcatctcttctatgtccatatggatcttgtccttttcatacgcctcatggaggtcaaacacattattaaaacaaagagcacatgttaaccgccacgtattcatgtgtgtatatttttggtaaaaatactgtatggcctctttcaggctatagcgtacggctatagcgtaccagtatttgagtagtaatgtactgagcaaaaactcattatttagcagatcggttttttctattaactcccttaactcccagaaaatttctatcctcaatttcagattatttactttttgtaatatcggattgttggaaaacacctcatggcataaaataatgttactactagttttatgaaactttagatctatgaaaatttgtaaaatttcctcttcattcaagatctccttggcacctaactcttgacagaggtcccgggtatgctccgtgttgacagataccagcccatagttgatgtccgccccccactctgtaaatagttttataaggctgtagttgttttcccttacagcctttactaacgccgtatttaggtctaagccctctttaatgcctgatgattttatgagccttaggttatgatcaaacgtgatcggagcattataccaccatagatcataatattttaaaagataatgttggttcgtgggcacgcattgtccagccaacacctttttggtcaaagattgcagggaaggcaacat

SEQ ID NO: 97 - DNA, 1050 bp, African swine fever virus
tcatcttaaatcgtaggaaaggaaggtcatcatattttttgatttataattttttaacacatgatctattatttcagggtccgtgtttttaggtaacggggcagtggacggactatagatctttagggataaaatgttccttataagctcatacccttcccctacaggcatattctcttcgaaaacatcagcccccagatccatacaaaagaacatgttttctatattatagtactgtattgaggcaagcatggcctgattaatgttggcgcccaggacatagcagtagtatatcgttgaaaggttgtggtctttgatgcaggctactcgcatcatctcttctaagtccatatagatcttgtccttttcatacgcctcatgaaggtcaaacacattattaaaacaaagagcacatgttaaccgccacgtattcaggtgtgtatatttttgataaaaatactgtatggcctctttcaggttatagcgtacggctatagcgtaccagtatttgagtaataatgtattgagtgaaaactcattatttaacagatcggttttttttattaactcccttaactcccagaaaatttctatcctcattttcagattatttactttttgtaataacggattgttggaaaacacctcatggcataaaataatgttactactagttttataaaactttagatcgatgaaaattcgtaaaatttcctcttcatttaaggtctccttggcgcctagctctctgcagaggtcccgggtgtgctccgtgttgacagataccagcccgtagttgatgtccgccccccactctgtaaaaagctttataaggttgtagttgttttcccttacagcctttactaacgccgtatttaggtctaagccatctttaatgcctgctgattttatcagccctaggttatgatcaaacgtgatcggagaatcataccaccataggtcgtaacactttaaaagataatattggtccgtcggcaggcattgtccagccagtacctttttggtcagagattgcagggaaggcaacat

SEQ ID NO: 98 - DNA, 1056 bp, African swine fever virus
tcatcttagatcataagtaaggaagaccatcatattttttgaaaagtaattttttaactcatgatctataatttcagggtccgtgcttttaggcaacggggtggtggccgggctataaatctttagggataaaatattccttataggctcatacccttcctgtcccactagagccataccctcttcaaaagcatcggcccccagatccatacaaaagaatatgttttctatattatagtactgtattgaggtaagcatggcctgattgatgttggcgcccagcatatagcagtagtatatcgttgaaaggctgtggtctttgatgcaggctatccgcatcatctcttctaaatccatacagatcttgtccttttcatacgcctcatgaaggtcaaacacgttattaaaacaaagagcacatgttaatcgccacgtattcaggtgcgtatatttttggtaaaaatactgtatggcctctttcaagttgtagcgtacggctatagcgtaccagtatttgagtaatagtgtattgagcgaaaactcattatttagcagatcggttttttctattatctcccttaactcccaaaaaatttctatcctcattttcaggttatttaccttttttaaaagtagattatcggaaaacacctcatgacataagataatgttactactggttttatgaaactttaaatctatgaaaatttgtaaaatatccccttcatttaaggtcttcttggcgcctagctctcgacagaggtcccaggtgtgctccgtgttgacagatatcagcccgtagttgatgttcgctccccactccgtaaatagttttataagactgtagttgttttcctttacagccttcactaatgccatgtttaggtctaagccttcttgaaggcctgctgattttatcagccttaggttatgatcaaacgtgatcggagcattattccaccatagatcgtaacactttaaaagataatgttggtcctcgggcagacattgtccagccagcacctttttggtcagagattgcagggaaggcaacat

SEQ ID NO: 99 - DNA, 1056 bp, African swine fever virus
tcatcttagatcataagtaaggaagaccatcatattttttgaaaagtaattttttaacgcatgatctataatttcagggtccgtgcttttaggcaatggggtagtggccgggctataaatctttagggataaaatattccttataggctcatacccttcctgtcccactagagccataccctcttcaaaagcatcggcccccagatccatacaaaagaatatgttttctatattatagtactgtattgaggtaagcatggcctgattgatgttggcgcccagcatatagcagtagtatattgttgaaaggttgtggtctttgatgcaggctatccgcatcatctcttctaaatccatacagatcttgtccttttcatacgcctcatgaaggtcaaacacgttattaaaacaaagagcacatgttaaccgccacgtattcaggtgtgtatatttttggtaaaaatactgtatggcctctttcaagttgtagcgtacggctatagcgtaccagtatttgagtaatagtgtattgagcgaaaactcattatttagcagatcggttttttctattatctcccttaactcccaaaaaatttctatcctcattttcaggttatttaccctttttaaaagtaaattatcggaaaacacctcatgacataagataatgttactactggttttataaaattttaaatctatgaaaatttgtaaaatatccccttcatttaaggtcttcttggcgcctagctctcgacagaggtcccaggtgtgctccgtgttgacagatatcagcccgtagttaatgttcgccccccactccgtaaatagttttataagactgtagttgttttcctttacagccttcactaatgccatgtttaggtctaagccttcttgaatgcctgctaattttatcagccttaggttatgatcaaacgtgatcggagcattattccaccatagatcgtaacactttaaaagataatgttggtcctcgggcagacattgtctagccagcacctttttggtcaaagattgcagggaaggcaacat

SEQ ID NO: 100 - DNA, 1062 bp, African swine fever virus
ctatagtatattatgagaatattcccaaatgatggataagttttttgatttataatcttttaataaactgcttatttcttcggggtcctttaagtttagtggcaaggaagcatctgagctgtaaatatccaaagccaaactatggctcagaaaattataacctttttgttccgctatggcacgaccctcttcaaaggcattaccacccaaatctatacagaaaaatatattaccgatgttataatattgtactgaagtaagcatagcttggttgatgttgccccccagcgcgtaacagtaatatattgttaatggattgttatccttggtagaagccagacatatcatgtcatggacgtctatttggatgttttccttgtggtacatctcatgaagctcatatattttgttataatacaggagacattttaatcgccattcattaagatccgtatatttctcatctagaaaacaaatggcgtccttacaatcgtattgtactgctttggcgtaccaatacttcactagtaaaccatttaactcgtccgtttcttttatttctatgagcccccatagtcttttataaattaagccccttaattgtataacaaatttgttttctaaaataggattattcataaaaatttcatggcacaaaataatactgccgctggttttattgtgcattatcctggtaaaaatacggaaaatatcgttgtcctctagagtttctttggcgcctagctgtctacacaactctcggatgtgcttcgtattgatagaaagcaaaccatagttgatatttgcgccccactctgtaaagagctttatcagactatagttgttttccttaacagctattattaatgccacacgaaggtctatatcttctcctaaaaatcctgattttatttgtattcggccacgatccatacaaagcttgagaggagcatcatgccaccataggccacaatatttcaaaatgcagtgttcatctattgacaaacactggctggctatcgtctttttgacgagggtctgcagagagagcggcaacgacat

SEQ ID NO: 101 - DNA, 1062 bp, African swine fever virus; identical to SEQ ID NO: 100

SEQ ID NO: 102 - DNA, 1062 bp, African swine fever virus
ctatagtatattatgagaatattcccaaatgatggataagttttttgatttataatcttttaataaactgcttatttcttcggggtcctttaagtttagtggcaaggaagcatctgagctgtaaatatccaaagccaaactatggctcagaaaattataacctttttgttccgctatggcacgaccctcttcaaaggcattaccacccaaatctatacagaaaaatatattaccgatgttataatattgtactgaagtaagcatagcttggttgatgttgccccccagcgcgtaacagtaatatattgttaatgggttgttatccttggtagaagccagacatatcatgtcatggacgtctatttggatgttttccttgtggtacatctcatgaagctcatatattttgttataatacaggagacattttaatcgccattcattaagatccgtatatttctcatctagaaagcaaatggcgtccttacactcgtattgtactgctttggcgtaccaatacttcactagtaaaccgtttaactcatccgtttcttttatttctatgagcccccatagtcttttataaattaagccccttaattgtatagtaaatttatcttctatattaggattattcataaatatatcatggcacaaaataatactgccgctggttttattgtgcattatcttggtgaaaatacggaaaatatcgtcgtcttctagagtttctttggcgcctagctgtctacacaactctcggatgtgcttcgtattgatagaaagcaaactatagttgatatttgcgccccactctgtaaagagctttatcagactatagttgttttccttaacagctattattaatgctatatggaggtctatatcttctcctaaaaatcctgattttatttgtatttggccacgatccatacaaagcttgagggggacatcatgccaccataggccacagtgtttcagaatgcagtgttcatctatcgacaaagactggttggctaccgtctttttgacgagggtctgcagagagagcggtaatgacat

SEQ ID NO: 103 - DNA, 1062 bp, African swine fever virus
ctatagtatattatgagaatattcccaaatgatggataagttttttgatttataatcctttaataaactgcttatttcttcggggtcctttaagtttagtggcaaggaagcatctgagctgtaaatatccaaagtcaaactatggcttagaaaatgataacctttttgttccgctatagcacgaccctcttcaaaggcattaccacccaaatctatacagaaaaatatattaccgatgttataatattgtactgaagtaagcatagcttggttgatgttgccccccagggcgtaacaataatatattgttaatggattgttatccttggtagaagccagacatatcatgtcatggacgtctatttggactttttccttgtggtacatctcatgaagctcatatattttgttataatacaggagacattttaatcgccattcattaagatccgtatatttctcatctagaaagcaaatggcgtccttacactcgtattgtactgctttggcgtaccaatacttcactagtaaatcgtttaactcatccgtttcttttatttctatgagcccccatagtcttttacaaattaagccccttaattgtatagtaaatttgttttctatattaggattattcataaatatctcatggcacaaaataatacggccgctggttttattgtgcattatcttggtgaaaatacggaaaatatcgttgtcctctagagtttctttggcacctagctgtctacacaactctcggatgtgctccgtattgatagaaagcaaactatagttgatatgtgcgccccattctgtaaagagctttatcagactatagttgttttccttaacagctattattaatgctatatggaggtctatatcttctcctaaaaatcctgattttatttgtatttggccacgatccatacaaagcttgagggggacatcatgccaccataggccacagtgtttcagaatgcagtgttcatctgtcgacaaacactggctggctaccgtctttttgacgagggtctgcagagagagcggcaacgacat

SEQ ID NO: 104 - DNA, 1062 bp, African swine fever virus
ctatagtatattatgagaatattcccaaatgatggataagttttttgatttataaccctttaataaactgcttatttcttcggggtcctttaagtttagtggcaaggaagcatctgagctgtaaatatccaaagccaaactatggcttagaaaatgataacctttttgttccgctatggcacgaccctcttcaaaggcattaccacccaaatctatacagaaaaatatattaccgatgttataatattgtactgaagtaagcatagcttggttgatgttgccccccagggcgtaacagtaatatattgttaatggattgttatccttggtagaagccagacatatcatgtcatggacgtctatttggactttatccttgtggtacatctcatgaagctcatatattttgttataatacaggagacattttaatcgccattcattaagacccgtatatttctcatctagaaagcaaatggcgtccttacactcgtattgtactgctttggcgtaccaatacttcactagtaaatcgtttaactcatccgtttcttttatttctatgagcctccatagtcttttacaaattaagccccttaattgtatagtaaatttgttttctatattaggattattcataaatatctcatggcacaaaataatacggccgctggttttattgtgcattatcttggtgaaaatacggaaaatatcgttgtcctctagagtttttttggcacctagctgtctacacaactctcggatgtgttccgtattgatagaaagcaaactatagttgatatgtgcgccccattctgtaaagagctttatcagactatagttgttttccttaacagctattattaatgctacatggagatctatatcttctcctaaaaatcctgattttatttgtatttggccacgatccatacaaagcttgagggggacatcatgccaccataggccacagtgtttcagaatgcagtgttcatctgtcgacaaacactggctggctaccgtttttttgacgagggtctgcagagagagcggcaacgacat

SEQ ID NO: 105 - DNA, 1062 bp, African swine fever virus
ctatagtatattatgagaatattcccaaattatggataagttttttgatttataatcctttaaaaaactgcttatttcttcggggtcctttaagtttagtggcaaggaagcatctgagctgaaaatatccaaagccaaactatggcttagaaaattataacctttttgttccgctatggcacgaccctcttcaaaggcattaccacccaaatctatacagaaaaatatattaccgatgttataatattgtattgaagtaagcatagcttggttgatgttgccccccagggcgtaacagtaatatattgttaatggattgttatccttggtagaagccagacatatcatgtcatggacgtctatttggactttttccttgtggtacatctcatgaagctcatatattttgttaaaatacaggagacattttaatcgccattcattaagatccgtatatttctcttctagaaagcaaatggcgtccttacactcgtattgtactgctttggcgtaccaatacttcactagtaaatcgtttaactcatccgtttcttttatttctatgagcccccatagtcttttacaaattaagccccttaattgtatagtaaatttgttttctatattaggattattcataaatatatcatggcacaaaataatacggccgctggttttattgtgcattatcttggtgaaaatacggaaaacatcgtcgtcttctagagtttctttggcgcctagctgtctacacaactctcggatgtgctccgtattaatagaaagcaaactatagttgatatgtgcgccccattctgtaaagagctttatcagactatagttgttttccttaacagctattattaatgctatatggaggtctatatcctctcctaaaaatcctgattttatttgtatttggccacgatccatacaaagcttgagggggacatcatgccaccataggccacagtgtttcagaatgcagtgttcatctatcgacaaacactggctggctaccgtctttttgacgagggtctgcagagagagcggcaacgacat

SEQ ID NO: 106 - DNA, 1062 bp, African swine fever virus
ctataatatattatgagaatattcccaaatgatggataagttttttgatttataatcttttaataaactgcttatttcttcggggtcctttaagtttaatggcaaggaagcatctgaactgtaaatatccaaagtcaagctatggcttaaaaaattataacctttttgttccgctatggcacgaccctcttcaaaggcattaccccccaaatctatacagaaaaatatattaccgatgttataatattgtactgaagtgagcatagcttggttgatgttgctccccagggcgtaacagtaatatattgttaatagattgttatccttggcacaagccagacatatcatgtcatggacgtctatttggacttttttcttgtggtacatctcatgaagctcatatattttgttataatacaggagacattttaatcgccattcgttaagatccgtatatttctcatctagaaagcaaatggcgttcttacaaacgtattgtactgctttggcataccaatacttcactagtaaatcatttaacttgtccgtttcttttatttctatgagcccccatagtcttttataaattaagccccttaattgtataacaaatttgttttctaaaataggattattcataaaaatttcatggcacaaaataatactgccgctggttttattgtgcattatcctggtgaaaatacggaaaatatcgttgtcctctagagtttctttggcgcctagctgtctacacaactctcggatgtgcttcgtattgatagaaagcaaactatagttgatatttgcgccccactctgtaaagagctttatcagactatagttgttttccttaacagctattattaatgccacacgaaggtctatatcttctcctaaaaatcctgattttatttgtattcggccacgatccatacaaagcttgagaggagcatcatgccaccataggccacagtatttcaaaatgcagtgttcatctattgacaaacactggctggctaccgtctttttgacgagggtctgcagagagagcggcaacgacat

SEQ ID NO: 107 - DNA, 1062 bp, African swine fever virus
ctataatatattatgagaatattcccaaatgatggataagttttttgatttataatcttttaataaactgcttattttttcggggtcctttaagtttaatggcaaggaagcatctgaactgtaaatatccaaagtcaagctatggcttaaaaaattataacctttttgttccgctatggcacgaccctcttcaaaggcattaccacccaaatctatacagaaaaatatattaccgacgttataatattgtactgaagtgagcatagcttggttgatgttgccccccagggcgtaacagtaatatattgttaatagattgttatccttggcacaagccagacatatcatgtcatggacgtctatttggacttttttcttgtggtacatctcatgaagctcatatattttgttataatacaggagacattttaatcgccactcgttaagatccgtatatttctcatctagaaagcaaatggcgttcttacaaacgtattgtactgctttggcataccaatacttcactagtaaatcatttaactcgtccgtttcttttatttctatgagcccccatagtcttttataaattaagccccttaattgtataacaaatttgttttctaacataggattattcataaaaatttcatggcacaaaataatactgccgctggttttattgtgcattatcctggtgaaaatacggaaaatatcgttgtcctctagagtttctttggcgcctagctgtctacacaactctcggatgtgcttcgtattgatagaaagcaaactatagttgatatttgcgccccactctgtaaagagctttatcagactatagttgttttccttaacagctattattaatgccacacgaaggtctatatcttctcctaaaaatcctgattttatttgtattcggccacgatccatacaaagcttgagaggagcatcatgccaccataggccacagtatttcaaaatgcagtgttcatctattgacaaacactggctggctaccgtctttttgacgagggtctgcagagagagcggcaacgacat

SEQ ID NO: 108 - DNA, 1062 bp, African swine fever virus
ctataatatattatgagaatattcccaaatgatggataagttttttgatttataatcttttaataaactgcttattttttcggggtcctttaagtttaatggcaaggaagcatctgaactgtaaatatccaaagtcaagctatggcttaaaaaattataacctttttgttccgctatggcacgaccctcttcaaaggcattaccacccaaatctatacagaaaaatatattaccgacgttataatattgtactgaagtgagcatagcttggttgatgttgccccccagggcgtaacagtaatatattgttaatagattgttatccttggcacaagccagacatatcatgtcatggacgtctatttggacttttttcttgtggtacatctcatgaagctcatatattttgttataatacaggagacattttaatcgccactcgttaagatccgtatatttctcatctagaaagcaaatggcgttcttacaaacgtattgtactgctttggcataccaatacttcactagtaaatcatttaactcgtccgtttcttttatttctatgagcccccatagtcttttataaattaagccccttaattgtataacaaatttgttttctaacataggattattcataaaaatttcatggcacaaaataatactgccgctggttttattgtgcattatcctggtgaaaatacggaaaatatcgttgtcctctagagtttctttggcgcctagctgtctacacaactctcggatgtgcttcgtattgatagaaagcaaactatagttgatatttgcgccccactctgtaaagagctttatcagactatagttgttttccttaacagctattattaatgccacacgaaggtctatatcttctcctaaaaatcctgattttatttgtattcggccacgatccatacaaagcttgagaggagcatcatgccaccataggccacaatatttcaaaatgcagtgttcatctattgacaaacactggctggctaccgtctttttgacgagggtctgcagagagagcggcaacgacat

SEQ ID NO: 109 - DNA, 1062 bp, African swine fever virus
ttagagtatattatgagagtaatccaaaatgatggataaattttttgatttataattttttaacaaactgcttatttcttcggggtcctttaagtttaatggcaaggaagcatccgagctataaatattcaaaaccaaactatggcttagaaaattataacctttttgtctcgctatggcactaccctcttcaaaggcattaccacccaaatctatacagaaatatatattaccgatgttataatattgcactgaagtaagcatagcttggttgatgttgccccccagggcataacagtaatatattgttaatggattgttatccctgatacaagccagggataacatttcattaacgtctatttggattttttccttgtggtatatatcatgaagctcatatattttgttataatataggtaacattttaatcgccattcattaagatccgtatatttctcatccagaaagcaaatggcatctttataatcgtattgtactgctttggcgtaccaatatttcactagtaattcacttaactcgtccgtttcttttatttctataagcccgcatagtcttttataaattaagcgccttaattgtgcagcaaatttgttttctaaattaggattatttataaatatctcatggcacaaaataacactgccgctggttttattatgcattatcttgttgaaaatacagaaaatatcgtagtcctccagagtttctttggcgcctagctgtctacacaaatctcggacgtgcttcgtattgatagaaagcagactatagttgatatttgcgcccaactctgtaaaaagctttattagattatagttgttttccttaacagctattattaatgccacacaaaggtctatatcttctcctaaaaatcccgattttatttgtattcggccacgatccatataaagcttgagaggggcatcatgccaccataagtcacagtatttcaaaatgtgttcatctatcgacaaacatgatgtactggctaccgtctttttgacgagggtttgtagagagagcggcgccgacat

SEQ ID NO: 110 - DNA, 1062 bp, African swine fever virus
ttagagtattttatgagagtaatccagaatgatggataaattttttgatttataattttttaataaactgcttatttcttcgggaacctttaagtttaatggcaaggaagcatctgagctataaatattcaaaattaaactatggcataaaaaattataaccattttgtctcgctatggcactaccctcttcaaaggcattaccacccaaatctatacagaaatatatattaccgatgttataatattgtactgaagtaagcatagcttggttgatgttgccccccagggcataacaataatatattgttaatagattgttatccctgatacaagccagagataacatttcattgacgtctatttggatttttttcttgtggtatatatcatgaagctcatatattttgttataacataggtaacattttaatcgccattcatcaagatccgtatatttttcatccagaaagcaaatggcatctttatgatcgtattgtactgcattggcgtaccaatatttcactagtaattcgcttaactcgtccgtttcttttatttctataagcccgcataatcttttataaattaagcgccttaattgtgcagcaaagttgttttctaatttaggattatttataaatatctcatggcacaaaataatactgccgctagttttattatgcattattttattgaaaatacagaaaatatcgtagtcgtctagagtttctttggcgcctagctgtctacacaaatctcgggcgtgcttcgtattgatagaaagcagactatagttgatatatgcgccccactctgtaaataactttatcagactatagttattttccttaacagctattattaatgccacacaaaggtctatatcttctcctaggaatcccgattttatgtatattcgtccacgatctatgtaaagcttgaggggagcatcatgccaccataagccacagtatttcaaaatgtgttcatctatcgacaaacatgatgtactggctaccgtctttttgacgagggtctgcagagagagcggcgacgacat

SEQ ID NO: 111 - DNA, 1062 bp, African swine fever virus
ttagagtattttatgagagtaatccagaatgatggataaattttttgatttataattttttaataaactgcttatttcttcgggatcctttaagtttaatggcaaggaagcatctgagctataaatattcaaaaccaaactatggcttaaaaaattataaccattttgtctcgctatggcactaccctcttcaaaggcattaccacccaaatctatacagaaatatatattaccgatgttataatattgtactgaagtaagcatagcttgattgatgttgccccccagggcataacaataatatattgttaatagattgttatccctgatacaagccagagataacatttcattgacgtctatttggattttttccttgtggtatatatcatgaagctcatatattttgttataacataggtaacattttaatcaccattcatcaagatccgtatatttttcatccagaaagcaaatggcatctttatggtcgtattgtactgcattggcgtaccaatatttcactagcaattcgcttaactcgtccgtttcttttatttctataagcccgcatagtcttttataaattaagcgccttaattgtgcagcaaagttgttttctaaattaggattatttataaatatctcatggcacaaaataatactgccgctagttttattatgcattatcttgttgaaaatacagaaaatatcgtagtcgtctagagtttctttggcgcctagctgtctacacaaatctcgggcgtgcttcgtattgatagaaagcagactatagttgatatatgcgccccactctgtaaataactttatcatactatagttgttttccttaacagctattattaatgccacacaaaggtctatatcttctcctaggaatcccgattttatgtatattcgcccacgatctatgtaaagcttgaggggagcatcatgccaccataagccacagtatttcaaaatgtgttcatctatcgacaaacatgatgtaccggctaccgtctttttgacgagggtctgcagagagagcggcgacgacat

SEQ ID NO: 112 - DNA, 1074 bp, African swine fever virus
ttagtctataactataatttctggatgggctgtaagatactcttcggctcgtttcagattttttgaagtatatgtctttagcatatcatatatttcctggggttcggttacatctaataccaaggtcacatcacggctgaaaagctgctttactaagaaaatgttgctcaagttatacatataagctttgtgcgcaatgagttgtgccctatcaaaatcggcagcccccaaatcaatacagaaaaacatgtttaaagtattattgttatagatagaaagattcatgccataatcgagactagcccccaacctatgacagtaataaatggccgcgtaatttttttcccgcaagcaagcaaatttcatcatcagattagggctgatgcaaatctctttttcacgacacaactcgtgtatgtcaaaaatgttattaaaataaaggctacaagctacccgccaatagaggtgatttttatgccttttatagaaatagtgaatagcctttgtaaaattatgtcgtaatgccagggcaaaccaaaactttgttaataggtggtgcgccgtatcccccgtcaacggaatgtttgaacaggtgtacgtaactgtgtctaaagtggttctagttacggtttccaagagtggattatgacaaaacatgtcataacccagcagaactcctgcacaggattttagcctggccacttcttttaaaatttccagaagacggggttcggatacaggcgttaagcctcccagttccgcacacagccgctttagatacacggcaggaacacgtataagcccatattcaggatttgcgccccaatccacaaataaacgtataagttcaagattatcgctcttcacggcctttactagcgccgcttcgagacaaagatcatcctcagaaaaacactgtaaatgtttatacgaaaaaacttgcttacaattgttacataggtgaataggacctaaatcccaccacaaaccaaaacgctgcaacgtataatcatagtcacttgaaagataattgcatgccacaacttttttggccaacgtttgtaaagacaacat

SEQ ID NO: 113 - DNA, 1074 bp, African swine fever virus; identical to SEQ ID NO: 112

SEQ ID NO: 114 - DNA, 1074 bp, African swine fever virus
ttagtctataactataatttctggatgggctgtaagatactcttcagctcgtttcagattttttgaagtatatgactttagcatatcatatatttcctggggttcggttacatctaatgccaaggtcacatcacggctgaaaagctgctttactaagaaaatgttgctcaagttatacatataagctttgtgcgcaatgcgttgtgccctatcaaaatcagtagcccccaaatcgatgcagaaaaacatgtttaaagtattattgttatagatagaaagattcatgccataatcgagactagcccctaacctataacagtaataaatggccgcataattttttttctgcaagcaagcaaatttcatcatcagattagggctgatgcaaatctctttttcacgacacaactcgtgtatgtcaaaaatgttattaaaataaaggctacaagctacccgccaatagaggtgatttttatgccttttatagaaatagtgaatagcctttgtaaaattatgtcgtaatgccagggcaaaccaaaactttgttaataggtggtgcgccgtatcccccgtcaacggaatgtttgaacaggtgtacgtaactgtgtctaaagtggttctagttacggtttccaagagtggattatgacaaaacatgtcataacccagcagaactcctgcacaggattttagcctggccacttcttttaaaatttccagaagacgggattcggatacaggcgttaagccacccagttccgtgcacagccgctttagatgcacggcaggaacacgtataagtccatattcaggatttgcgccccaatccacaaataaacgtataagctcaagattatcgctcttcacggcctttactagcgccgcttcaagacaaagatcatcctcagaaaaacactgtacatgtttatacgaaaaaatttgcttacaattattacataggtgaataggacctaaatcccaccacaaaccaaaacgctgcaacgtataatcatagtcacttgaaagataattgcatgccacaacctttttggccaatgtttgtaaagacaacat

SEQ ID NO: 115 - DNA, 1074 bp, African swine fever virus
ttagtctataactataatttctggatgggctgtaagatactcttcggctcgtttcagattttttgaagtatatgactttagcatatcatatatttcctggggttcggttacatctaatgccaaggtcacatcacggctgaaaagctgctttactaaaaaaatgttgctcaagttatacatataagttttgtgcgcaatgcgttgtgccctatcaaaatcagtagcccccaaatcgatgcagaaaaacatgtttaaagtattattgttatagatagaaagattcatgccataatcgagactagcccctaacctataacagtaataaatggccgcataattttttttccgcaagcaagcaaatttcatcatcagattagggctgatacaaatctctttttcacgacacagctcgtgtatgtcaaaaatgttattaaaataaaggctacaagctacccgccaatagaggtgatttttatgccttttataaaaatagtgaatagcctttgtaaaattatgtcgtaatgccagggcaaaccaaaactttgttaataggtggtgcgccgtatcccccgtcaacggaatgtttgaacaggtgtacgtaactgtgtctaaagtggttctagttacggtttccaagagtggattatgacaaaacatgtcataacccagtagaactcctgcacaggattttagcttggccacttcttttaaaatttccagaagacggggttcggatacaggcgttaagcctcccagttccgtgcacagccgctttagatgcacggcaggaacacgtataagtccatattcaggatttgcgccccaatccacaaataaacgtataagctcaagattatcgctcttcacggcctttactagcgccgcttcaagacaaagatcatcctcagaaaaacactgtaaatgtttatacgaaaaaatttgcttacaattgttacataggtgaataggacctaaatcccaccacaaaccaaaacgctgcaacatataatcatagtcacttgaaagataattgcatgccacaacctttttggccaacgtttgtaaagacaacat

SEQ ID NO: 116 - DNA, 1074 bp, African swine fever virus
ttagtctataactataatttctggatgggctgtaagatactcttcggctcgtttcatattttttgaagtatatgcctttagcctatcatatatttcctggggttcggttacatctaatgccaaggtcacatcacggctgaaaagctgctttactaaaagaatgttgctcaagttatacatataagctttgtgcgcaatgcgttgtgccctatcaaaatcagtagcccccaaatcgatgcagaaaaacaggtttaaagaattattgttatagatagaaagattcatgccataatcgagactagctcccaacctataacagtaataaatggccgcgtaatttttttcccgcaagcaagcaaatttcatcatcagattagggctaatgcaaatctctttttcacgacacagctcgtgtatgtcaaaaatgttattaaaataaaggctacaagctacccgccaatagaggtgatttttatgccttttatagaaatagtgaatagcctttgtaaaattatgtcgtaatgccagcgcaaaccaaaactttgttaataggtggtgcgccgtatcccccatcaacggaatttttgaacagctgtacataactgtgtctaaagtggttctagttatggtttccaagagtgggttataacaaaacatgtcataacccagtagaactcctgcacaggattttaggttggccacttcttttaaaatttccagaagacggggttcggatacaggtgttaagcctcccagttctgtgcacagccgctttagatgcacggtaggaacacatataagtccatattcaggatttgcaccccaatccacaaataaacgtataagctcaagattatccctcttcacggcctttactagcgccgcttcaagacagagatcatcctcagaaaaacactgtaaatgtttatacgaaaaaatttgcttacaattgttacacaggtgaataggacctaaatcccaccacaaaccaaaacgctgcaacatataatcatagtcacttgaaagataattgcatgccacaacctttttggccaacgtttgtaaagacaacat

SEQ ID NO: 117 - DNA, 1074 bp, African swine fever virus
ttagtctataactataatttctggatgggctgtaagatactcttcggctcgtttcagattttttgaagtatatgactttagcctatcatatatttcctggggttcggttacatctaatgccaaggtcacatcacggctgaaaagctgctttactaagaaaatgttgctcaagttatacatataagctttgtgcgcaatgtgttgtgccctatcaaaatcagtagcccccaaatcgatgcagaaaaacatgtttaaagtattattgttatagatagaaagattcatgccataatcgagactagcccctaacctataacagtaataaatggccgcataattttttttctgcaagcaagcaaatttcatcatcagattagggctgatgcaaatctctttttcacgacacagctcgtgtatgtcaaaaatgttattaaaataaaggctacaagctacccgccaatagaggtgatttttatgccttttatagaaatagtgaatagcctttgtaaaattatgtcgtaatgccagggcaaaccaaaactttgttaataggaggtgcgccgtatcccccgtcaacggaatgtttgaacaggtgtacgtaactgtgtctaaagtggttctagttacggtttccaagagtggattatgacaaaacatgtcataacccagtagaactcctgcacaggattttagcttggccacttcttttaaaatttccagaagacggggttcggttacaggcgttaagcctcccagttccgtgcacagccgctttagatgcacggcaggaacacgtataagtccatattcaggatttgcgccccaatccacaaataaacgtataagctcaagattatcgctcttcacggcctttactagcgccgcttcaagacaaagatcatcctcagaaaaacactgtaaatgtttatacgaaaaaatttgcttacaattgttacacaggtgaataggacctaaatcccaccacaaaccaaaacgctgcaacgtataatcatagtcacttgaaagataattgcatgccacaacctttttggccaacgtttgtaaagacaacat

SEQ ID NO: 118 - DNA, 1074 bp, African swine fever virus
ttagtctataactataatttctggatgggctgtaagatactcttcggcccgtttcatattttttgaagtatatgtctttagcatatcatatatttcctggggttcggttacatctaataccaaggtcacatcacggctgaaaagctgctttactaagaaaatgttgctcaagttatacatataagctttgtgcgcaatgagttgtgccctatcaaaatcggcagcccccaaatcaatacagaaaaacatgtttaaagtattattgttatagatagaaagattcatgccataatcgagactagcccccaacctatgacagtaataaatggccgcgtaatttttttcccgcaagcaagcaaatttcatcatcagattagggctaatgcaaatctctttttcacgacacagctcgtgtatgtcaaaaatgttattaaaataaaggctacaagctacccgccaatagagctgatttttatgccttttataaaaatagtggatagcctttgtaaaattatgtcgtaatgccagggcaaaccaaaactttgttaataggaggtgcgccgtatcccccgtcaacggaatgtttgaacaggtgtacgtaactgtgtctaaagtggttctagttacggtttccaagagtggattatgacaaaacatgtcataacccagtagaactcctgcacaggattttaggttggccacttcttttaaaatttccagaagacggggttcggatacaggcgttaagcctcccagttccgcacacagccgctttagatacacggcaggaacacgtataagcccatattcaggatttgcgccccaatccacaaataaacgtataagttcaagattatcgctcttcacggcctttactagcgccgcttcaagacaaagatcatcctcagaaaaacactgtaaatgtttatacgaaaaaacttgcttacaattgttacataggtgaataggacctaaatcccaccacaaaccaaaacgctgcaacgtataatcatagtcacttgaaagataattgcatgccacaacttttttggccaacgtttgtaaagacaacat

SEQ ID NO: 119 - DNA, 1074 bp, African swine fever virus
ttagtctataactataatttctggatgggctgtaagatactcttcggctcgtttcatattttttgaagtatatgtctttagcatatcatatatttcctggggttcggttacatctaataccaaggtcacatcacggctgaaaagctgctttactaagaaaatgttgctcaagttatacatataagctttgtgcgcaatgagttgtgccctatcaaaatcggcggcccccaaatcaatacagaaaaacatgtttaaagtattattgttatagatagaaagattcatgccataatcgagactagcccccaacctatgacagtaataaatggccgcgtaatttttttcccgcaagcaagcaaatttcatcatcagattagggctaatgcaaatctctttttcacgacacagctcgtgtatgtcaaaaatgttattaaaataaaggctacaagctacccgccaatagagctgatttttatgccttttataaaaatagtggatagcctttgtaaaattatgtcgtaatgccagggcaaaccaaaactttgttaataggaggtgcgccgtatcccccgtcaacggaatgtttgaacaggtgtacgtaactgtgtctaaagtggttctagttacggtttccaagagtggattatgacaaaacatgtcataacccagtagaactcctgcacaggattttaggttggccacttcttttaaaatttccagaagacggggttcggatacaggcgtcaagcctcccagttccgcacacagccgctttagatacacggcaggaacacgtataagcccatattcaggatttgcgccccaatccacaaataaacgtataagttcaagattatcgctcttcacggcctttactagcgccgcttcaagacaaagatcatcctcagaaaaacactgtaaatgtttatacgaaaaaacttgcttacaattgttacataggtgaataggacctaaatcccaccacaaaccaaaacgctgcaacgtataatcatagtcacttgaaagataattgcatgccacaacttttttggccaacgtttgtaaagacaacat

SEQ ID NO: 120 - DNA, 1074 bp, African swine fever virus; identical to SEQ ID NO: 119

SEQ ID NO: 121 - DNA, 1074 bp, African swine fever virus
ttagtctataactacaatttctggatgggctgtaaaatactcttcggcttgttttagattttttgacgtatatgtatttagcatatcatatattgcctggggctcagttagatctaatatcaagctcacatcacggctgaaaagctgttttactaaaaaaaggttgctcaagttatacatataaactctacgcgcaatgagtcgcgccctatcaaagttagtagcccccaaatcaatgcagaaaaataggtttaaagtattattgttatagatagatagattcatgccataatcaagactagcccctaacatatgacagtaataaatggctgcataattttcttcccgcaagcaagcaaatttcatcatcagattagggctaatgcaaatctcttttttacaacacagctcatgcaagtcaaaaatgttgttaaaataaaggctacaagtcagtcgccaatagagctgatttttatgcttttcgtagaaatagtgaatagcttttgtaaaattatgtcgtaatgccagggcaaaccaaaactttgataataggaggtgcgccgtatcccccgtcaacggaatttttgaacgggtgtacataactgtgtctaaggtggttctagtcacggtttccaagagtggattatgacaaaacatgtcataacccagtagaactcctgcacaggatttcagatcggccacttcttttaaaatctccagaagacgagattcggatacaggtgttaagcctcctagttccatgcacagccgctttagatgcacggcaggaacacgtataagtccatattcaggatttgcgccccaatccacaaacaatcgtataagctcaagattatcgctcttcacggcctttactagcgccgcttcaagacaaagatcatcctcagaaaaacactgtaaatgtttatatgaaaaaatttgcttacatgtattacataagtgaataggacctaaatcccaccacaaaccaaaacgctgcagcgtataatcataatcacttgaaagataattgcatgccacaacttttttggccagcgtttgtaaagacaacat

SEQ ID NO: 122 - DNA, 1074 bp, African swine fever virus
ttagtctataactacaatttctggatgggctgtaaaatactcttcggctcgttttagattttttgacgtatatgtctttagcatatcatatattgcctggggttcggttatatttaataccaagctcgcatcacggctgaaaagctgttttactaaaaaaatgttgctcaagttatacatataaactctatgcgcaatgagtcgcgctctatcaaagttagtagcccccaaatcaatacagaaaaataggtttaaagtattattgttatagatagatagattcatgccataatcgggactagcccccaacatatgacagtaataaatggctgcataattttcttcccgcaggcaagcaaatttcatcattagattagggctaatgcaaatctcttttttagaacacagctcatgcaagtcaaaaatattattaaaataaaggctacaagccagccgccaatagagctgatttttatgcttttcatagaaatagtgaatcgcttttgtaaaattatgtcgtaatgccagggcaaaccaaaacttcgttaataggaggtgcgccgtatcccccgtcaacggaatttttgaacgggtgtacataacggtgtttaaagtggttctagtcacggtttccaagagtggattatgacaaaacatgtcataacccagtagaactcctgcacaggatttcagatcggccacttcttttaaaatttccagaagacgagattcggagacaggtgttaagcctcctagttctgtgcacagccgttttagatccacggcaggaacacgtataagtccatattcaggatttgcgccccaatccacaaacaatcgtataagctcaagattatcgctcttcacggcctttactagcgccgcgtcaagacaaagatcatcctcagaaaaacactgcaaatgttgatacgaaaaaatttgcttacatgtattacataagtgaataggacctaaatcccaccacaaaccaaaacgctgcagcgtataatcatagtcacttgaaagataattgcatgccacaacctttttggccaacgtttgtaaagacaacat

SEQ ID NO: 123 - DNA, 1074 bp, African swine fever virus
ttagtctataacgacaatttctggatgggctgtaaaatactcttcggctcgttttagattttttgacgtatatgtctttagcatatcatatattgcctggggttcggttatatttaataccaagctcgcatcacggctgaaaagctgttttactaaaaaaatgttgctcaagttatacatataaactctatgcgcaatgagtcgcgctctatcaaagttagtagcccccaaatcaatgcagaaaaataggtttaaagtattattgttatagatagatagattcatgccataatcgggactagcccccaacatatgacagtaataaatggctgcataattttcttcccgcaggcaagcaaatttcatcattagattagggctaatgcaaatctcttttttagaacacagctcatgcaagtcaaaaatgttattaaaataaaggctacaagttagccgccaatacagctgatttttatgtttttcgtagaaatagtgaatcgcttttgtaaaattatgccgtaatgccagggcaaaccaaaacttcgttaataggaggtgcgccgtatcccccgtcaacggaatttttgaacgggtatacataactgtgtttaaagtggttctagtcacggtttccataagtggattatgacaaaacatgtcataacccagtagaactcctgcacaggatttcagatcggccacttcttttaaaatttccagaagacgagattcggagacaggtgttaagcctcctagttccgtgcacagccgttttagatgcacggcaggaacacgtataagtccatattcaggatttgcgccccaatccacaaacaatcgtataagctcaagattatcgctcttcacggcctttactagcgccgcgtcaagacaaagatcatccacagaaaaacactgcaaatgttgatacgaaaaaatttgcttacatgtattacataagtgaataggacctaaatcccaccacaaaccaaaacgctgcagcgtataatcatagtcacttgaaagataattgcacgccacaacttttttggccaacgtttgtaaagacaacat

SEQ ID NO: 124 - DNA, 1071 bp, African swine fever virus
atgtctactccactttctctacagactcttgttaaaaaagtgctggccacacagcacatatctaaagaacactactttattttgaaatattgtggtttatggtggcatgaagcgccgattacgatttgcattgatgaggatagccaaatattgataaaatcggcaagcttcaaagaaggcttatctttagatatcgcattaatgaaagtcgtgcaagaaaataaccatgatttaatagagttgtttaccaagtggggtgcagatatcaactctagcttagttactgttaatacggagtatacccggaacctttgtcagaaattaggcgcaaaggaagctttgaatgaaagggatattttacaaatattttataaaacacgtcatcttaaaactagcagtaatattattttatataatgaattgttttctaataatctccttttccaaaatatagagagattgagtttaatagtttataggggcttgaaaaacttatcaatcaactttatattggatgatatttcatttagcgaaatgttaactagatactggtatagtatggcgatattatataaccttactgaagccatccaatatttttatcaacgatataggcattttaaagattggcggcttatatgtgggctttcttttaacaatttgtctgaccttcatgaagtatataacttagagaagacggatatagacattgatgaaatgatgaagttgacctgtagtacgtatgatggtaattattcgactatttattattgttttatgttgggggctgacatcaatcgggcaatgttaacctcggtaataaactttcatattggtaacttgttcctttgtatagatttaggagctgatgctttcgaagacagcatggaactagcaaaacaaaagaataataatatattagtagaaatattatcatttaaaaattattatagttcaaatacctctcttttatcaataaaaacgacagatccggaaaaaattaatgccttattagatgaagaaaagtatgagtcaaaaaatatgttaatgtatgaagaattatctcattga

SEQ ID NO: 125 - DNA, 1071 bp, African swine fever virus; identical to SEQ ID NO: 124

SEQ ID NO: 126 - DNA, 1065 bp, African swine fever virus
atgtctactccactttctctacagactcttgttaaaaaagtgctggccacacagcacgtatctaaagatcactactttattttaaaatattgtggtttgtggtggcataaggccccgattacgatttgcattgatgaggatagccaaatattgataaaatcggcaagctttaaagaaggcttacctttagatatggcattaatgaaagctgtacaggaaaacaactatgaaatgatcatgttgtttactgagtggggtgcagacattaactctagcttagtcactgttaatacggagcgtacccggaacctttgtcgagaattaggcgcgaaggaaattttgaatgaaaaagaaattttagaaatattttataaaacatgtcatattaaaactagcagtaattttattctatgccatgaattgttatccaataatccccttttccaaaatatagagagtttgagtttaatagtttataggggcttgaaaaacttatcaattaactttatattggatgatatttcatttagcgaaatgttaactagatactggtatagctgggcgatattatataaccttactgaagctattcaatatttctatcaaacatacaagcattttaaagattggcggctaatatgtggacttgcttataataacgtgtttgatcttcatgaaatttataacatagaaaagactgatttagatattgatgaaatgatgcagttggcttgtatgtatgatagtaattattcaactatttattattgttttatgttgggggctaatatcaatcaggcaatgttaacctcggtaataaaccattatattaataacttgttcctttgtatagatttgggagctgacgccgtcaaagacagcatggaactagcaaaacaaaagaattataatatattagtaaaaatattaacatttaaaaattatagtccagactcttctcttttatcattaaaaacgacagatccggaaaaaattaatgccttactagatgaagaaaagtatgagtcgaaaaatatgttaatgtatgaagaatcatctcgttga

SEQ ID NO: 127 - DNA, 1052 bp, African swine fever virus
atgccttctccacattctctacagactcttgctaaaaaaatactggctacacagcagatatctacagatcactactttattttaaaatattgtggtttatggtggcatggagctccaattatgctttctactaatgaggataatcaattgatgataaaatcggcaagcttcaaagaaggcttatctttagatttggcattaatgaaagtcgtgcaagaaaacaatcatgatttaataaagctgtttaccgagtggggtgcagacatcaactctagcttcgtcactgttaatatggagtgtacccgaaacctctgtcgggaattaggcgcgaaggaagctttgaatgaaagggatattttacaaatattttataaaacacgtgatattaaaactagcagtcatgttattttatgccatgaattattatccaataacccccttttccagaatatagagagaatgcgttcaataatttataggagtctggaaaaactatcaatcaactttatattggatgatatttcatttagtgaaatgttaactagacactggtatgggttggcgatattatataacctaactgaagctatccaatatttctatgaaaaatacaagcattttaaaaattggcggctaatatgtggactttcttttaacaatctgtctgatctttatgaaatatataatttagagaaggttgatatgaacattgatgaaatgatgtatctggcctgtagtatatatgatggtaattattcaactatttattattgttttgtattgggagctgatatcaatcaggcaatgttaacctcagtaataaaccattgtattggtaacttgttcctttgtatagatttaggggctgatgctttcgaagacagcatggaactagcaaagcaaaaaaatgataatatttttattagtatattatcatttaaaaattacagtccagactcttctcttttgtcattaaaaatgacagatccggaaaaaattaatgccttactagatgaagaaaagtatgagtcaaaaaatatgttaatgtttga

SEQ ID NO: 128 - DNA, 1086 bp, African swine fever virus
atgcctactccactttctctacagactcttgctaaaaaagtactggccacacagtatatatccatagattattactttattttgaaatattgtggtttatggtggcatggagcccctattatgatttccattgataagaataaaagccaaatactgataaaatcggcaagcttcaaagaaggcttatctttagatatcgcattaatgaaagctgtgcaggaaaacaatcatgatttaataaagctgtttaccgagtggggtgcagacatcaactctagcttagtcactgttaatacggagtgtacccgaaacctctgtcgggaattaggcgcgaaggaagctttgaatgaaagggatattttacaaatattttataaaacacgtgatattaaaactagcagtaatgttatactatgccatgaattgttatccaataacccccttttccaaaatatagagagaatgcgttcaataatttataggagtctggaaaaactatcaattaactttatattggatgatatttcatttagcgaaatgttaactagacactggtataggttggcgatattatataacctaactgaagctatccaatatttctatgaaaaatacaagcattttaaagattggcggctaatatgtgggctttcttttaacaatctgtctgaccttcatgaaatatataacttagagaaggttgatatggacattgatataatgatgtatctggcctgtagtacgtatgatggtaattattcaactatttattattgttttgtattgggggctgatatcaatcaggcaatgttaacctcggtaataaaccatcgtattggtaacttgttcctttgtatagatttaggggctgatgccttcgaagacagtatgaaactagcaaaacaaaagaatcataatatattagtacatatattatcgtttaaaaactatagtccagacttctcccttttatcaataaaaacgacagatccagagaaaattaatgccttactagatgaagaaaagtatgagtcaaaaaatatgttaatgtatgatgaatttgacgcctgtactaataatgtttaa

SEQ ID NO: 129 - DNA, 1086 bp, African swine fever virus; identical to SEQ ID NO: 128

SEQ ID NO: 130 - DNA, 1074 bp, African swine fever virus
atgcctacaccgtcttctttacaagtccttgtcaaaagggtgttggactaccagcatcatgtatctgaagatgattattgtattttacagcattgtgggttgtggtggcatggaagtccaattatgttttttactaatgaaaatcatcaaaggatgataaaatcagcaagctttaaagatggtttagaaataaatctcgcattaatgaaggccgtacaggaaaacaattgtatcttaatagagctgtttaccgaatggggtgcagacattaattatggattgattactgtcaatacggaatatacccgaaacctatgtcgaaatctaggtgccaaggaggcgttaaatacacggaaaattttagatgtatttttaaatttaaaggattttaaaagtagtaatcatattattctatgccatgaattgttatctaataatcctcttttactaagtgaaaataatgattatttgagaaaaataattaattgtaatctaaggagaatatcaattaactttatattggatgaaatttcatttaatgaaaagctaaccagattctggtataaacaggcagtactaaataatcttactgaagctatccaatatttctatcaaaaatataagcagtttaaagactggcgactaatatgtggacttgctttaaataatgtatttgatcttcatgaaatatataacaaagagaaggctgatatagatattaatcaaatgatagagataacctgtacatatatgtgtagttatcccaccatttactattgttttgtaatgggggctgacattaatcgggcaatgattacctcagttacaaaatcttatactggtaacttgttcttttgtatagatttaggagctactgccttcgaagagtgcttagaaatagcaaaacaacagaatgataatgaattggtaaaggtattatcattgaaaaactattacagtccagatagctcccttttatcattaaaaataacagatccggaaaaaattaatatcttattagatgatgaaacatatgagtcaaaaaatgagttaatatatgaagaattaatataa

SEQ ID NO: 131 - DNA, 1095 bp, African swine fever virus
atgtccacaccatcttctttacaagtccttgtcaaaagggtgctggacttccagcatgtgtctgaagatgattactgtattttaaaatgttgtgggttatggtggcatggaggcccaatcatgctttctacgaatgaggataatcaaatgatgataaaatcagcaagttttaaagatggtttagagataaatctcgcattaatgatggccgtacaagaaaacaattgtagcctaatagagctgtttaccgaatggggtgcagacattaattctggattggttactgtcaacacggaatacacccgaaacctatgtcgaaatctaggtgctaaggagacattaaataaacgggaaattttagatgtatttttaaaattaaagaattttaaaagtagtaataatattattctatcccatgaattattatctaataatcctcttttcctaagtgaagataatgattattttagaagaataattaattgtaatctaaggagaatatcaattaactttatattggatgaaatttcatttaatgaaaagctaaccagattctggtatagtcaggcggtactatataatcttactgaagctatccaatatttctatcaaaaatatgaacatctcaatgagtggcgtttaatttgtgcgctttcttttaataatgtgtttgatcttcatgaaatatataacaaagaaaaggttggtatggatattaatcaaatgatagagataacctgtgcatatatgtgtagttattccaccatttactattgttttgtaatgggagctgacattaatcgggcaatgattatctcggttacaaaatcttatacttataacttgttcttttgtatagatttaggagctactgccttcgaagagtgtttagaaatagcaaaacaacagaataataatgaattagtaaaaatattatcattgaaaaactattatagtccagatagctcccttatatcattaaaaataacagatccggagaaaattaatatcttattagatgaggaaaattatgagtcaaaaaatgagttaatatatgaagaatctaatataaataatagcgatgatatattttga

SEQ ID NO: 132 - DNA, 1071 bp, African swine fever virus
atgccatctactttacaagcacttgctaaaaaagtactggccacaccgcatatatctaaaaaatattgtcagtctaaggagtactgtcatatattaaaatgttgtggtttatggtggcatgatgctccaattacaatttatccttgtataaataaaatattgataaaaacagcaagctttaaacatggtttagagttgaatgtcgcattcatgaaagctgtacaggaaaataattatgatctaataaggctgtttattgagtggggtgcggatatcaactttgggttggccactgttaatacagaccgtacccgggacctgtgccgggaactaggtgcgaaggaagctttaagtgaaaaagaaattttagaaatatttgataaaatacagtatattaaaagtagcagtaatattattgtatcccatgaattattatctaataacccccttttcttaaataatgatcaattgaaattaagaatgttcgatgaactacataaactatcaatcaactttgtattacatgagatatcatttaatgaaatgctaactaggtattggtatagtatggcgatactatataacctcaccgcagccattcaatatttttatcaatcctacaagcattttaaagattggcggttaatatgtgggcttgcttataacaacgtgtttgatcttcatgaaatatataacaaagagaaggttgatatggatattaatcaaatgatgcagttggcctgtatgtatgatggtaattatacaaccatttattattgttttatgttgggagctgacattaatcgggcaatgattacctcggttacaaaatcttgtgatggtaacttattcctttgtatagatttgggggctgatgtatttgaagagagtatgaaaatggcaatagaagatcataatgacgtattagaaagtatcttatcatttaaaaattattatagttcagacgtttctctgttatcattaaagacgacagatccagaaaaaattaatgccttgttagaagaagaaagttacaaatcaaaaaataggttgatatataaaagttattga

SEQ ID NO: 133 - DNA, 1074 bp, African swine fever virus
atgatgccatctactttacaaacacttgctaaaaaaacattggccacacagcatatatctaaaaaatattggccgtctgaggagtattgttatatattaaaatgttgtggtttatggtggcatgattctccaatcacgatttttacttgtataaaacaaatattaataaaaacagcaaactttaaacatggtttagacttaaaccttgcattaatgaaagctgtacaagaaaataactatgaattgatcatgttgtttactgagtggggtgcggatatcaacttggggttgatcactgttaatacagagtgcacccgagatttgtgccaaaagttaggtgcaaaggaagctttgagtgcaaaggaaattttagaaatattttataaaatacagtatattaagagtagcaataatattattatatctcatgaattaatatctaatcatccccttttcctaaataatgatcaattgaaattaagaattgttggtgaactaaatgctatatcaatcaactttatattggatgagatatcattcaatgaaatgctaactaggtattggtatagtatggcgatactatataaactccctgcagccattcaatatttttatcaatcatacaagtattttaaagattggcggttaatatgtagccttgcttataacaacgtgtttgaccttcatgaaatttataataaagagaagactgatataaacattgatgaaatgatgcggttggcctgtaggtatgatggtaattatacaactatttattattgttttatgttgggggctgacattaatcaggcaatgattacctcggtcatgaatctttgggacggtaacttatttctttgtatagatttgggggctgatgtatttgaagagtgtatgaaaatagcaatagaagatcataatggtgtattagaaagtatcttatcatttaaaaattattatagtccagacgtttctctgttatcattaaaaacgacagatccggaaaaaattaatgacttgctagatgaagatatctataaatcaaaaaataggttgatatataaaagttgttga

SEQ ID NO: 134 - DNA, 1596 bp, African swine fever virus
atgttctctctccagaacttatgtcgaaaaacattacctaaccgtaaacttcctgaattttttgacgaatatatattacaactgctgggattatactgggaaaaccatggaactattcaacgagcaggaaacaactgtgtgcttatacagcaacataccctcattcccgtaaatgaagccctgagaacagcagcatctgaagaaaattatgagatcgtgagccttttattagcgtgggaggggaacctttactatgctattataggggctctagagggcaaccgccacgacttaattcgtaaatatgatgaccaaatcaaggaccatcatgaaattctgccattcattgacgatccagtcatatttcacaaatgccatatcatgcggcaatgcttttttgattgtattttatatcaagctgtaaaatatagtaagtttcgcgttcttctttactttaaacatagattagaggatgatttgcccttcactcatttacttattgaaaaggcatgtaaagatcataattatgaagttattaaatggatatatgaaaacctacatatctacaatatgatagatacctttgaatgtgctattgcccataaggatctacatctatattgtttggggtatagatttatatataacagaatcgtacccgataagtatcatcatttagatattcgcatgctttcaagcctacaactcctacataaggtggcagccaaaggatacttagattttatcctagaaaccttaaagtatgatcataataaagataatataaatattattctaacacaagctgcaacctataaccatagaaaaattttaatctatttcattcctcaatcaacccacgcacagatagaacaatgtttactagtggcgataaaagcaaaatcttccaggaaaaccttgaacttactactgtctcacctaaacctttccatcaacctcatcaaaaaaataagccattatgttgccacttacaattcaacaaatataataggcattctgagtatgcggcggaaaaagaagatatatttagatatcatattgacaaaatttgtaaaaaaagctatttttaataagtttgtcgttcgatgtatggatacattttctataaacccggaaagaatccttaaaatagccgcgcgaataaataggatgatgttagtgaaaaaaatatctgaacatgtttggaaaaatcatgcggttagacttaaataccttaaacatgcggtacacacgatgaagcataaagatgggaaaaatagactcatgaactttatctatgatcgctgttattaccatatgcaaggggaagaaatctttagcctcgcaagattttatgcaatccatcatgcaccaaagttgtttgacgttttttatgattgttgtatcctagatacgatacgattcaaaagccttcttttagattgttcacatatcataggtaaaaacgctcatgatgctaccaatatcaacatcgtgaacaagtatatcggcaacctgtttgttatgggagttcttagcaaaaaagaaatcttacaggactatccatccatttattctaaacaatacatgccttag

SEQ ID NO: 135 - DNA, 1596 bp, African swine fever virus; identical to SEQ ID NO: 134

SEQ ID NO: 136 - DNA, 1596 bp, African swine fever virus
atgttctctcttcagaacctatgtcgaaaaacattacctgactgtaaacttcctgaattttttgacgaatatatattacaactgctgggattatactgggaaaaccatggaactattcaacgagcaggaaacaactgtgtgcttatacagcaacataacctcattcccgtaaatgaagccctaagaatagcagcatctgaagaaaattatgagatcgtgagtcttttattagcatgggaggggaacctttactatgctattataggggctctagagggcaaccgccacgacttaattcgtaagtatgatgaccaaatcaaggaccatcatgaaattctgccattcattgacgatccagtaatatttcacaaatgccatatcatgcggcaatgcttttttgattgtattttatatcaagctgtaaaatatagtaagtttcgcgttcttctttcttttaaacatagattaagggatgatttgcccttcactcatttacttattgaaaaggcatgtaaagatcataattatgaagtaattaaatggatatatgaaaacctacatatctacaatatgatagatacctttgaatgtgctattgcccataaggatctacgtctatattgtttggggtatagatttatatataacaggatcgtacccgataagtatcatcatttagatattcgcatgctttcaagcctacaactcctgcataaggtggcagccaaaggatacttagattttatcctagaaaccttaaagtatgatcataataaagataatataaatattattctaacacaagctgcaacctataaccatagaaaaattttaatctatttcattcctcaatcaacccacgcacagatagaacaatgtttactagtggcgataaaaacaaaatcttccaagaaaaccttgaacttactactgtctcacctaaacctttccatcaatctcatcaaaaaaataagccattatgttgccacttacaattcaacaaatataataggcattctgagtatgcggcggaaaaagaagatatatttagatatcatattgacaaaatttgtaaaaaaagctatttttaataaatttgtcgttcgatgtatggatacattttctataaacccggaaagaatccttaaaatagccgcgcgaataaataggacgatgttagtgaaaaaaatatctgaacatgtttggaaaaatcatgcggttagacttaaataccttaaacatgcggtacacacgatgaagcataaagatgggaaaaatagactcatgaactttatctatgatcgctgttattaccatatgcaaggggaagaaatctttagcctcgcaagattttatgcaatccatcatgcaccaaagttgtttgacgttttttatgattgttgtatcctagatacgatacgattcaaaagccttcttttagattgttcacatatcataggtaaaaacgctcatgatgctaccaatatcaacatcgtgaacaagtatatcggcaacctgtttgttatgggagttcttagcaaaaaagaaatcttacaggactatccatccatctattctaaacattacatgccttag

SEQ ID NO: 137 - DNA, 1596 bp, African swine fever virus
atgttctctctccagaacctatgtcgaaaaactttacctgactgtaaacttcctgaattttttgacgaatatatattacaactgctgggattatactgggaaaaccatggaactattcaacgagcaggaaacaactgtgtgcttatacagcaacgtaccctcattcccgtaaatgaagccctgagaatagcagcatctgaagaaaattatgagatcgtgggccttttattagcgtgggaggggaacctttactatgctattataggagctctagagggcaaccgccacgacttaattcgtaaatatgatgaccaaatcaaggaccatcatgaaattctgccattcattgacgatccagtcatatttcacaaatgccatataatccgacgatgcttttttaattgtattttatatcaagctgtaaaatatagtaagtttcgcgttcttctttactttaaacatagattagaggatgatttgcccctcactcatttacttattgaaaaggcatgtgaagatcataattatgaagttattaaatggatatatgaaaacctacatacctacgatataatggatacctttgaatgtgctattgcccataaggatctacgtctatattgtttggggtatacatttatatataacaggatcgtaccctatgagtatcatcatttagatattctcattctttcaagcctacaactcctgcataaggtggcagccaaaggatacttagattttatcctagaaaccttaaagtatgatcataacaatgataatttagatattattctaacacaagctgcaacatataaccatagaaaaattttaacctatttcattcctcaattaacctacgcacaaatagaacaatgtttgttcatggcgataaaaagaaaatcttccaagaaaaccttgaacttactactgtctcacctaaccctttccatcgaactcatcaaaaaaataagccaatatgttgtcacttacaattcaacaaatataataggcattctgagtatgaagcggaaaaagaagatatatttagatatcatgttgacaaaatatgtaaaatacgctatttttaataaatatgtcgttcgatgtatggatagattttccataaacccggaaagaatcatcaaaatggccgcgcgaataaataggatgatgttagtgaaaaaaatatctgaacatgtttggaaaaatcatgcggctagacttaaacaccttaagcatgcggtacacacgatgaagcataaagatgggaaaaatagactcatgaactttatctatgatcgctgctattaccatatgcaaggggaagaaatctttagcctcgcaagattttatgcaatccatcatgcaccaaagttgtttgacgttttttatgattgttgtatcctagatactatacaattcaaaagccttcttttagattgttcacatatcataggtaaaaacgctcatgatgctaccaatatcaacatcgtgaacaagtatattggcgacctgtttgctatgggagttcttagcaaaaaagaaatcttacaggactatccatccatctattctaaacattacatgctttag

SEQ ID NO: 138 - DNA, 1596 bp, African swine fever virus
atgttctctctccagaacttatgtcgaaaaacattacctgattgtaaacttcctgaattttttgacgattatatattacaactgctgggattatactgggaaaaccatggaactattcaacgggcaggaaacaactgtgtgcttatacagcaacatacccttattcccataaatgaagccctgagaacagcagcatctgaagaaaattatgagatcgtgagccttttattagcatgggaggggaatctttactatgctattataggggctctagagggcaaccgccacgacttaattcgtaaatatgatgaccaaatcaaggaccatcatgaaattctgccattcattgacgatccagtaatatttcacaaatgccatatcatgcggcgatgcttttttgattgtattttatatcaagctgtaaaatatagtaagtttcgcgttcttctttattttaaatataggttagaggatgatttacccctcactcatttacttattgaaaaggcatgtgaaaatcataattatgaagttattagatggatatatgaaaacctacatatctacaatatgatagatacctttgaatgtgctattgcccataaggatctacgtctatattgtttggggtatacatttatatataacaggatcgtacccaataagtatcatcatatagatattctcattctttcaagcctacaactcctgcataaggtggcagccaaaggatacttagactttatcctagaaaccttaaagtatgatcataacaatgataatttagatattattctaacacaagctgcaacatataaccatagaaaaattttaacctattttattcctcaatcaacctacgcacaaatagaacaatgtttgatggtggcgataaaaacaaaatcttccaagaaaaccttgaatttactattgtcccacctaaacctttccatcaaactcatcaaaaaaataagccaatatgttgtcacttacaattcaacaaatataataggcattctgagtatgaagcgaaaaaagaagatatatttagatatcttgttgacaaaatttgtaaaaaatgctatttttaataaatttgtcgttcgatatatggatacgttttctataaacccggaaaaaatcgtcaaaatggccgcgcgaataaataagatgatgttagtgaaaaaaatatctgaacatatttggaaaaatcatgcggctagacttgaacaccttaaacatgcggtacacacgatgaagcataaagatgggaaaaatagactcatgaactttatctatgagtactgctattaccatatgcaaggggaagaaatttttagcctcgcaagattttatgcaatccatcatgcaccaaagttgttcgacgttttttataattgttgtatcctagatacgatacgattcaaaagccttcttttagattgttcacatatcataggtaaaaacgctcatgatgctactaatatcaacatcgtgaacaagtatattgacaacctgtttgctatgggagttcttagcaaaaaagaaatcttacaggactatccatccatttattctaaacattatatgccttag

SEQ ID NO: 139 - DNA, 1596 bp, African swine fever virus
atgttttctctccagaacttgtgtcgaaaaacattacctgactgtaaacttcctgaattttttgacgaatatatattacaactgctgggattatactgggaaaaccatggaactattcaacgagcaggaaacaactgtgtgcttatacagcaacataccctcattcccgtaaacgaagccctgagaatagcagcatctgaagaaaattatgagatcgtgagccttttattagcgtgggagggaaacctttactatgctattataggagctctagagggcaaccgccacgacttaattcgtaaatatgatgaccaaatcaaggaccatcatgaaattctgccattcattgacgatccagtcatatttcacaaatgccatatcatgcggcgatgcttttttgattgtattttatatcaagctgtaaaatatagtaagtttcgcgttcttctttattttaaatataggttagagaatgatttgcccctcgctcatttacttattaaaaaggcatgtgaagatcataattatgaagttattaaatggatatatgaaaacctacatatctacaatataatggatacctttggatgtgctattgcccataaggatctacgtctatatcgtttggggtatacatttatatataacaggatcgtaccctataagtatcattatttagatgttctcattctttcaggcctacatctcctgtataaggtggcagccaaaggatacttagattttatcctagaaaccttaaagtatgatcataacaatgataatttagatattattctaacacaagctgcaacatataaccatagaaaaattttaacctattacattcctcaattaacctatgcacaaatagaacaatgtttgttcatggcgattaaaaaaaaatcttccaagaaaaccttgaacttactactgtctcacctaaagctttccatcaaactcatcaaaaaaataagccaatatgttgccacttacaattcaacaaatataataggcattctgaatatgcggcggaaaaagaagatatatttagatatcatattgacaaaatttgtaaaaaaagctatttttaataaatttgtcgttcgatgtatggatacattttccataaacccggaaagaatcatcaaaatggccgcgcgaataaataagatgttgttagtgaaaaaaatatctgaacatgcttggaaaaatcatgcggctagacttaaacaccttaagcatgcggtatacacgatgaaacataaagatgggaaaaatagactcatgaacttgatctatgatcactactattaccatatgcaaggggaagaaatctttagcctcgcaagattttatgcaatccatcatgcaccaaagttgtttgacgttttttatgattgttgtctcctagatactatacgatttaaaaaccttcttttagattgttcacacatcataggtaaaaacgctcatgatgctactaatatcactatcgtgaacaagtatattggcaacctgtttgctatgggagttcttagcaaaaaagaaatcttacaggactatccatccatctattctaaacattacatgccttag

SEQ ID NO: 140 - DNA, 1596 bp, African swine fever virus
atgttctctctccagaacttatgtcgaaaaacattacctgactgtaaacttcctgaattttttgacgattatatattacaactgctgggattatactgggaaaaccatggaactattcaacgggcaggaaacaactgtgtgcttatacaacaacataccctcattcccgtaaatgaagccctaagaatagcagcatctgaagaaaattatgagatcgtgggccttttattagcgtgggaggggaacctttactatgctattataggggctctagagggtaaccgctacaacttaattcgtaaatatgatgatcaaatcaaggaccatcatgacattctgccattcattgatgatccaatcatatttcacaaatgccatatcatgcggcgatgcttttttgattgtattttatatcaagctgtaaaatatagtaagtttcgtgttcttctttattttaaatatacattagaggatgatttgcccctcgttcatttacttattgaaaaggcatgtgaagatcataattatgaagttattaaatggatatatgaaaacctacatgtctgccatataatagatacctttgactgtgctattgcccataaagatctacgtttatattgtttggggtatacatttatatacaacaggattgtaccctataagtatcatcatttagatattctcatactttcaagcctacaactcctacataaggtggcggccaaaggatacttagattttatcctagaaaccttaaagtatgatcataatatagataatttagatgttattctaacacaagctgcaacatataaccatagaaaaattttaacctattttattcctcaatcaacctacgcacaaatagaacaatgtttgttcgtggcgataaaaacaaaatcttccaagaaaaccttgaacttactactgtctcacctaaacctttccatcaaactcatccaaaaaatcagccaatatgttgccactttcaattcaacaaatataataggcattctgagtatgaagcggaaaaagaagatatatttggatatcatattgacaaaatttgtaaaaaatgctatttttaataaatttgtcgttcgatgtatggagagattttctataaacccggaaagaatcgtcaaaatggctgcgcgtataaataagatgatgttagtgaaaaaaatatctgaacatgtttggaaaaatcatgcggctagacttaaacaccttaaacatgcggtacacacgatgaagcataaagatgggaaaaatagactcatgaactttatctatgaacactgctattaccatatgcaaggggaagaaatttttagcctcgcaagattttatgcaatccatcatgcaccaaagttgttcgacgttttttataattgttgtatcctagatacgatacgattcaaaagccttcttttagattgttcacatatcataggtaaaaacgctcatgatgctactaatatcaacatcgtgaacaagtatattggcaacctgtttgctatgggagttcttagcaaaaaagaaatcttacaggactatccatccatctattctaaacattatatgccttag

SEQ ID NO: 141 - DNA, 1596 bp, African swine fever virus; identical to SEQ ID NO: 140

SEQ ID NO: 142 - DNA, 1596 bp, African swine fever virus
atgttctctctccagaacttatgtcgaaaaacattacctgactgtaaacttcctgaattttttgacgaatatatattacaactgctgggattatactgggaaaaccatggaactattcaacgagcaggaaacaactgtgtgcttgtacaacaacataccctcattcccgtaaacgaagccctgagaatagcagcgtctgaagaaaattatgagatcgtgagccttttattagcgtgggagggaaacctttactatgctattataggagctctagagggcaaccgccacgacttaattcgtaaatatgatgaccaaatcaaggaccatcatgaaattctgccattcattgacaatccagtcatatttcacaaatgccatataatgcggcgatgcttttttgattgtattttatatcaagctgtaaaatatagtaagtttcgcgttcttctttattttaaatataggttagagaatgatttgcccctcgctcatttacttgttgaaaaggcatgtgaagatcataattatgaagttattaaatggttatatgaaaacctacatatctacaatataatggagacctttgaatgtgctattgcccataaggatctacgtctatatcgtttggggtatacatttatatataacaggatcgtaccctataagtatcattatttagatgttctcattctttcaggcctacatctcctgtataaggtggcagccaaaggatacttagattttatcctagaaaccttaaagtatgatcataacaatgataatttagatattattctaacacaagctgtaacatataaccatagaaaaattttaacctattacattcctcaattaacctatgcacaaatagaacaatgtttgttcatggcgattaaaaaaaaatcttccaagaaaaccttgaacttactactgtctcacctaaagctttccatcaaactcatcaaaaaaataagccaatatgttgccacttacaattcaacaaatataataggcattctgaatatgaagcggaaaaagaagatatatttagatatcatattgacaaaatttgtaaaatacgctatttttaataaatatgtcgttcgttgtatggatacattttccataaacccggaaagaatcatcaaaatggccgcgcgaataaataagatgttgttagtgaaaaaaatatctcaacatgcttggaaaaatcatgcggctagacttaaacaccttaagcatgcggtatacacgatgaaacataaagatgggaaaaatagactcatgaacttgatctatgatcactactattaccatatgcaaggggaagaaatctttagcctcgcaagattttatgcaatccatcatgcaccaaagttgtttgacgttttttatgattgttgtctcctagatactatacgatttaaaagccttcttttagattgttcacacatcataggtaaaaacgctcatgatgctactaatatcactatcgtgaacaagtatattggcaacctgtttgctatgggagttcttagcaaaaaagaaatcttacaggactatccatccatctattctaaacattacatgccttag

SEQ ID NO: 143 - DNA, 1593 bp, African swine fever virus
atgttttctctccagaacttatgtcgaaaaaccttacctgaccgtaaacttcctgaattttttgacgattatgtattacaactgctgggattatactgggaaaaccatggaacgattcaacgagcaggaaacaactgtgtacttatccaacaacataacctcattcccgtaaatgaagccctaagaatagcagcatctgaagaaaattatgagatcgtgagccttttattagcttgggaggggaacctttactatgctattataggggctctagagggtaatcgccacaacttaattcgtaaatatgatgaccaaatcaaggaccatcatgaaattctgccatttattgacgatccagtcatatttcacaaatgtcatatgatgcggcgatgcttttttaattgtattttgtatcaagctgtaaaatatagtaagtttagcgttcttctatattttaaatatatattaaaggagaatttgcccctcgttcattcacttattgaaaaggcgtgtgaagatcataattatgaagttattaaatggatctatgaaaacctacatatctatgaaataatggatacctttaaatgtgctattgcccataaagatctacatttatatagtttaggatatacatttatatataataggatcgtaccctataagtatcatcatttagatattcgcatactttcaaggctacaacttctacataaggtgacagccaaaggatacttggactttatcctagaaaccttaaagtatgatcataataaagataatataaatattattctgacacaagctgcaacctataaccatagaaacattttaacctatttcattcctcaatcaacctacgcgcagatagaacaatgcttattcgtggcaataaaaacaaacgcttccaagaaaaccttgaatttactattatctcacctaaacctttctatcaaactcgtcaaaaaattaagccaatatgttgttgcttacaagtcaacaaatatcataagcattctgagtatgcagcaaaaaaagaagatatatttagatatcattttgacaaaggttgtaaaaaacgctatttttattaaatttgtcattggatgtatggttacattttccataaacccagaaagaattgtcaaaatggccgcgcgaataaaaaagatgaagttagtgaaaaatatatctgaacatgtttggaaaaatcatgcggctaaacttaaacaccttaagcatgcggtacacacgatgaagcatcaagaaggaaaaaatagattaatgaactttatctatgatcactgttattaccacatgcaaggagaagagatctttagtcttgcaagattttatgcaatccatcatgcgccaaaattgttcgacgttttttatgattgttgtatcctagatacgatacgatttaaaagcctgcttttagattgttcatatatcatagctaaaaacgctcatgatgctagtattaacatcgtgaataagtatattggcaatctatttgctatgggggttcttagcaaaaaagaaatcttacaagactatccatccatctattctaaggattacatgctttag

SEQ ID NO: 144 - DNA, 1593 bp, African swine fever virus
atgttctctctccagaacttatgtcgaaaaaccttacctgactgtaaacttcctgagttttttgacgattatgtattacaactgctgggcttatactgggaaaatcatggtacgattcaacgagcaggaaacaactgtgtacttatccaacaacataacctcattcccgtaaatgaagccctaagaatagcagcatctgaggaaaattatgagatcgtgagccttttattagcgtgggaggggaacctttactatgctattataggggctctagaggggaaccaccacaacttaattcgtaaatacgatgaccaaatcaaggaccatcatgaaattctgccatttattgacgatccagtcatatttcacaaatgtcatacaatgcggcgatgcttttttaattgtattttatatcaagctgtaaaatatagtaagttcagcgttcttctatactttaaatatatattaaaggagaatttgcccctcgtccactcacttattgaaaaggcgtataaatatcataattatgaggttattaaatggatctatgaaaacctacatatctatgatatcataaatacttttaaatgtgctattgcccataaagatctacgtttatattgtttagggtatacatttgtatataatagaatcgtaccctataagtattatcatttagatattcgcatccttttaaggctacaacttctacataaggtgacagccaaaggatacttggattttatcctagaaaccttaaagtatgatcataatacaaacaatatagatattatcctaacacaggctgcaacctataaccatagaaacattttaacctatttcattcctcaatcaacctacgcacaaatagaacaatgtttattcgtggcgataaaaacaaatgcttccaagaaaaccttgaatttactattatctcacctaaatctttctatcaaactcgtcaaaaaattaagccaatatgttgtcgcttacaagtcaacaaatatcataagcattctgagtaggcagcaaaaaaagaagatatatttagatatcattttgacaaaggttgtaaaaaatgctgtttttaataaatttgtcattggatgtatggttacattttccataaacccagaaagaattgtcaaaatggccgcgcgaataaaaaagatgaagttagtaaaaaatatatctgaacatgtttggaaaaatcatgcggttaaacttaaatatcttaagcatgcggtacacacgatgaagcatcaagaaggaaaaaatagattaatgaactttatctatgatcactgttattaccacatgcaagaagaagagatctttagcctcgcaagattttatgcaatccatcatgcgccaaaattgttcgacgttttttatgattgttgtatcctagatacgatacgatttaaaagcctgcttttagattgttcacatatcatagttaaaaacgctcatgatgctagtattaacatcgtgaacaagtatattggcaatctatttgctatgggagttcttagcaaaaaagaaatcttacaagactatccatctatctattctaaggattacatgctttag

SEQ ID NO: 145 - DNA, 1593 bp, African swine fever virus
atgttctctctccaaaacttatgtcgaaaaaccttacctgactgtaaacttcctgaattttttgacgattatgtattacaactgctgggattatactgggaaaaccatggaacgattcaacgagcaggaaacaactgtgtacttatccaacaacataacctcattcccgtaaatgaagccctaagaatagcagcatctgaagaaaattatgagatcgtgagccttttattagcgtgggaggggaacctttactatgctattataggggctctagagggtaaccgccacaacttaattcgtaaatatgatgaccaaatcaaggaccatcatgaaattctgccatttattgacgatccagttatatttcacaaatgtcatataatgcggcgatgcttttttaattgtatgttgtatcaagctgtaaaatatagtaagtttagcgttcttctatattttaaatatatattaaaggaaaatttgcccctcgtccactcactcattgaaaaagcgtataaatatcataattatgaggttattaaatggatctatgaaaatctacatatctatgatatcataaatacttttaaatatgctattgcccataaagatctacgtttatattgtttagggtatacatttgtatataataggatcgtaccctataagtattatcatttagatattcgcatccttttaaggctacaacttctacataaggtgacagccaaaggatacttggattttatcctagaaaccttaaagtatgatcataatacaaacaatatagatattatcctaacacaggctgcaacctataaccatagaaacattttaacctatttcattcctcaatcaacctacgcacaaatagaacaatgcttattcgtggcaataaaaacaaacgcttccaaaaaaaccttgaatttactattatctcacctaaacctttctatcaaactcgtcaaaaaattaagccaatatgttgtcgcttacaagtcaacaaatatcataagcattctgagtatgcagcaaaaaaagaagatatatttagatatcattttgacaaaggttgtaaaaaacgctgtttttattaaatttgtcattggatgtatggttacattttccataaacccagaaagaattgtcaaaatggccgcgcgaataaaaaagatgaagttagtaaaaaatatatctgaacatgtttggaaaaatcatgcggctaaacttaaacatcttaagcatgcggtacacacgatgaagcatcaagaaggaaaaaatagactcatgaactttatctatgatcactgctattaccacatgcaaggagaagagatctttagtcttgcaagattttatgcaatccatcatgcgccaaaattgttcgacgttttttatgattgttgtatcctagatacgatacgatttaaaagcctgcttttagattgttcacatattatagctaaaaacgctcatgatgctagtattaacatcgtgaataagtatattggcaatctatttgctatgggagttcttagcaaaaaagaaatcttacaagactatccatccatctattctaaatatgacatactttag

SEQ ID NO: 146 - DNA, 1593 bp, African swine fever virus
atgttctctctccagaacttatgtcgaaaaacattacctgactgtaaacttcctgaattttttgacgaatatatattacaactgctgggattatactgggaaaaccatggaactattcaacgagcaggaaacaactgtgtgcttatccagcaacataaccttattcccgtaaatgaagccctaagaatagcagcatctgaagaaaattatgagatcgtgagccttttattagcgtgggagggaaacctttactatgctattataggggctctagagggcaaccgccccgacttaattcgtaaatatgatgaccaaatcaaggaccatcatgaaattttgccattcatcgacgatccaatcatatttcacaaatgtcacataatgcggcgatgcttttttaattgtattttatatcaagctgtaaaatatagtaagtttcgtgttcttctttattttaaacataggttaggggatgatttgcccctcactcatttacttattgaaaaggcatgtgaagatcataattatgaagttattaaatggatctatgaaaacctacatagctacaatataatggatacctttgaatgtgctattgcccataaggatctacgtctatattgtttggggtatacatttatatataataggatcgtaccctataagtatcatcatttagatatttgcatactttcaagcctacaactcctgcataaggtggcagccaaaggatacttggattttatcctagaaaccttaaagtatgatcataacataaataatatagatattattctaacacaagctgcaacctataaccatagaaaaattttaacctatttcattcctcaattaacctacgcacagatagaacaatgtttactagtggcgataaaaacaaaagcttccaagaaaaccttgaacttactactgtctcacctaaacctttccatcaaactcatcaaaaaaataagccaatatgttgtcacttacaattcaacaaatatcataagcattctgagtatgcggcggaaaaagaagatatatttagatatcattttgacagagtttgtaaaaaacgctatttttaataaatttgtcgttcgatgtatggatacattttccataaacccggaaagaattgtcaaaatggccgcacgaataaataggatgatgttagtgaaaaatatatctgaacgtgtttggaaaaatcatgcggttaaacttaaacaccttaagcatgcggtacatacgatgaagcatcaagaaggaaaaaatagactcatgaactttatctatgatcactgctattaccacatgcaaggggaagagatctttggcctcgcaagattttatgcaatccatcatgcacccaagttgtttgacgttttttatgattgctgcatgctagatgctacacgatttaaaagcctgcttttagattgtccacatatcataggtaaaaacgcttatgatgctggtatcaacctcgtgaacaaatatattggcaacctatttgctatgggggttcttagcaaaaaagaaatcttacaggactatccatctatctattctaaacatgatatgttttag

SEQ ID NO: 147 - DNA, 1581 bp, African swine fever virus
atgttttcccttcaagacctttgccgaaagcatctttttattcttcccgatgtttttggcgagcatgtactacaacgattaggactgtattggagatgtcacggctcccttcaacgcataggagacgaccacatactcatacgacgggatctcatcctttccaccaacgaggccttaagaatggcgggagaggaaggaaacaatgaagtagtaaagctcttgttactgtggaagggaaatcttcattacgccgtcataggagccttgcagggtgatcaatatgacctgatccataagtatgaaaaccaaatcggcgactttcattttatcttaccattgattcaagacgcgaatacgtttgaaaaatgccacgctttagaacgtttttgtggtgtttcatgtctgctaaaacatgctacaaaatacaacatgctccctattctccaaaaataccaagaagagctgtctatgagagcgtatcttcacgaaaccctatttgaactagcatgcctatggcagaggtatgatgtccttaaatggatagagcaaaccatacatgtttacgacctaaagattatgtttaatattgccatctccaagagggatctgactatgtactccttaggatatattttcctttttgatagagggaacaccgaagctacgttgctaacgcaacatctcaagaagacagcggccaaagggctcctccactttgtgctagaaacgttaaaatacggcggcaacatagataccgtcctgacccaagccgtaaagtacaatcatagaaaacttttagattattttctgcgtcaactacctcgtaaacatattgaaaaacttttgttgctggccgtgcaggaaaaggcttctaaaaaaacattgaacttactgttgtcacatttaaactactccgtgaaacgcatcaaaaaactaccgcgctatgtgatagagtacgagtccaccttggtgataaagattttattaaaaaaaagagtgaacctgatagatgccatgttggaaaagatggtaagatatttttctgcgacgaaagtgaggacgatcatggatgagctttcgattagtccggaaagagtcattaagatggctatacagaaaatgagaacggatatcgtaatccatacttcttatgtttgggaggatgatctagaacgtcttactcgtcttaaaaatatggtatacaccataaagtacgaacatgggaaaaaaatgttaattaaagtcatgcacggcatatacaaaaacttattatacggcgaaagggaaaaagtcatgttttatttagccaagctctatgttgctcaaaacgcggccacccaattcagagacatttgtaaggactgttacaaactggatgtggcacggtttaaaccgcggtttaagcaactaatattagactgtttagaaattattactaaaaaatcttgctatagtatcctggaaatcttagaaaaacatattatttccctgtttactatgaaagttatgactgaagaagaaaaaaacctatgtttagaaatattatataaagtaattcattataaaacaatacaatgttaa

SEQ ID NO: 148 - DNA, 1581 bp, African swine fever virus; identical to SEQ ID NO: 147

SEQ ID NO: 149 - DNA, 1581 bp, African swine fever virus
atgttttcccttcaagacctttgccgaaagcatctttttattcttcccgatgtttttggcgagcatgtactacaacgattaggactgtattggagatgtcacggctcccttcaacgcataggagacgaccacatactcatacgacgggatctcatcctttccaccaacgaggccttaagaatggcgggagaggaaggaaacaatgaagtagtaaagctcttgttactgtggaagggaaatcttcattacgccgtcataggagccttgcagggtgatcaatatgacctgatccataagtatgaaaaccaaatcggcgactttcattttatcttaccattgattcaagacgcgaatacgtttgaaaaatgccacgctttagaacgtttttgtggtgtttcatgtctgctaaaacatgctacaaaatacaacatgctccctattctccaaaaataccaagaagagctgtctatgagagcgtatcttcacgaaaccctatttgaactagcatgcctatggcagaggtatgatgtccttaaatggatagagcagaccatgcatgtttacgacctaaagattatgtttaatattgccatctccaagagggatctgactatgtactccttaggatatattttcctttttgatagagggaacaccgaagctacgttgctaacgcaacatctcgagaagacagcggccaaagggctcctccactttgtgctagaaacgttaaaatacggcggcaacatagataccgtcctgacccaagccgtaaagtacaatcatagaaaacttttagattattttctgcgtcaactacctcgtaaacatattgaaaaacttttgttgctggctgttcaggaaaaggcttctaaaaaaacattgaacttactgttgtcacatttaaactactccgtgaaacgcatcaaaaaactgctgcgctatgtgatagagtatgagtccaccttggtgataaagattttgttaaaaaaaagagtaaacctgatagatgccatgttggaaaagatggtaagatatttttctgcgacaaaagtgaggacgatcatggatgagctttcgattagtccggaaagagtcattaagatggctatacagaaaatgagaacggatatcgtaatccatacttcttatgtttgggaggatgatctagaacgttttactcgtcttaaaaatatggtatacaccataaagtacgaacatgggaaaaaaatgttaattaaagtcatgcacggcatatacaaaaacttattatacggcgaaagggaaaaagtcatgtttcatttagccaagctctatgttgctcaaaatgcggccacccaattcagagacatttgtaaggactgttacaaactggatgtggcacggtttaaaccgcggtttaagcaactaatattagactgtttagaaattgttactaaaaaatcttgctatagtatcctggaaatcttagaaaaacatattatttccctatttactatgaaagttatgactgaagaagaaaaaaacctatgtttagaaatattatataaagtaattcattataaaacaatacaatgttaa

SEQ ID NO: 150 - DNA, 1581 bp, African swine fever virus
atgttttcccttcaagacctttgccgaaagcatctttttattcttcccgatgtttttggcgagcatgtactacaacgattaggactgtattggagatgtcacggctcccttcaacgcataggagacgaccacatactcatacgacgggatctcatcctttccaccaacgaggccttaagaatggcgggagaggaaggaaacaatgaagtagtaaagctcttgttactgtggaagggaaatcttcattacgccgtcataggagccctgcagggtgatcaatatgacctgatccataagtatgaaaaccaaatcggcgactttcattttatcttaccattgattcaagacgcgaatacgtttgaaaaatgccacgctttagaacgtttttgtggtgtttcatgtctgctaaaacatgctacaaaatacaacatgctccctattctccaaaaataccaagaagagctgtctatgagagcgtatcttcacgaaaccctatttgaactagcatgcctatggcagaggtatgatgtccttaaatggatagagcagaccatgcatgtttacgacctaaagattatgtttaatattgccatctccaagagggatctgactatgtactccttaggatatattttcctttttgatagagggaacaccgaagctacgttgctaacgcaacatctcgagaagacagcggccaaagggctcctccactttgtgctagaaacgttaaaatacggcggcaacatagataccgtcctgacccaagccgtaaagtacaaccatagaaaacttttagattattttctgcgtcaactacctcgtaaacatattgaaaagcttttgttgctggctgttcaggaaaaggcttctaaaaaaacattgaacttactgttgtcacatttaaactactccgtgaaacgcatcaaaaaactgctgcgctatgtgatagagtatgagtccaccttggtgataaagattttgttaaaaaaaagagtaaacctgatagatgccatgttggaaaagatggtaagatatttttctgcgacgaaagtgaggacgatcatggatgagctttcgattagtccggaaagagtcattaagatggctatacagaaaatgagaacggatatcgtaatccatacttcttatgtttgggaggatgatctagaacgtcttactcgtcttaaaaatatggtatacaccataaagtacgaacatgggaaaaaaatgttaattaaagtcatgcacggcatatacaaaaacttattatacggcgaaagggaaaaagtcatgtttcatttagccaagctctatgttgctcaaaatgcggccacccaattcagagacatttgtaaggactgttacaaactggatgtggcacggtttaaaccgcggtttaagcaactaatattagactgtttagaaattgttactaaaaaatcttgctatagtatcctggaaatcttagaaaaacatattatttccctatttactatgaaagttatgactgaagaagaaaaaaacctatgtttagaaatattatataaagtaattcattataaaacaatacaatgttaa

SEQ ID NO: 151 - DNA, 1581 bp, African swine fever virus; identical to SEQ ID NO: 150

SEQ ID NO: 152 - DNA, 1554 bp, African swine fever virus
atgttttcccttcaagacctttgccgaaagcatctttttattcttcccgatgtttttggcgagcatgtactacaacgattaggactgtattggagatgtcacggctcccttcaacgcgtaggagacgaccacatactcatacggcgggatctcatcctttccaccaacgaggccttaagaatggcgggagaggaaggaaacaatgaagtagtaaagctcttgttactgtggaagggaaatcttcattacgccgtcataggagccttgcagggtgatcaatatgacctgatccataagtatgaaaaccaaatcggcgactttcatcttatcttaccattgattcaagacgcgaaaacgtttgaaaaatgccatgctttagaacgtttttgtggtgtttcatgtctgctaaaacatgctacaaaatacaacatgctccctgttctccaaaaataccaagaagagctgtccatgagagcatatctttgcgaaaccctatttgaactagcatgcctatggcagaggtatgatgtccttaaatggatagagcaaaccatgcatgtttacgacctaaagattatgtttaatattgccatctccaagagggatctgactatgtactccttaggatatattttcctttttgatagagggaacaccgaagctacgttgctaacgcaatatctcgagaagacagcggccaaagggctcctccactttgtgctagaaacgttaaaatacggcggtaacatagatattgtcctgacccaagccgtaaagtacaatcatagaaaacttttagattattttctgcgtcaactacctcgtaaacatattgaaaagcttttgttgctggccgtgcaggaaaaggcttctaaaaaaacattgaacttactgttgtcacatttaaactactccgtgaaacgcatcaaaaaactgctgcgctatgtgatagagtacgagtccaccttggtgataaagattttattaaaaaaaagagtaaacctgatagatgccatgttggaaaagatggtaagatatttttctgcgacgaaagtgaggacgatcatggatgagcttttgattagtccggaaagagtcattaagatggctatacagaaaatgagaacggatatcgtaatccatacttcttatgtatgggaggatgatctagaacgacttactcgtcttaaagatatggtatacaccgtaaagtacgaacatgggaaaaaaatgttaattaaagtcatacacggcatatacaaaaacttattatacggcgaaaaagaaaaggtcatgtttcatttagccaagctctatgttgctcaaaacgcggccacccaattcagagacatttgtaaggactgttacaaactggatgtggcacggtttaaaccgcggtttaagcaactaatgttagactgtttagaaattgttactaaaaaatcttgctatagtattctggaaatcttagaaaaacatatgatttccctatttactatgaaagttatgactgaagaagaaaaaaacctatgtttagaaatattatataagtaa

SEQ ID NO: 153 - DNA, 1554 bp, African swine fever virus
atgttttcccttcaagacctttgccgaaagcatctttttattcttcccgatgtttttggcgagcatgtactacaacgattaggactgtattggagatgtcacggctcccttcaacgcgtaggagacgaccacatcctcatacggcgggatctcatcctttccaccaacgaggccttaagaatggcgggagaagaaggaaacaatgaagtagtaaagctcttgttactgtggaagggaaatcttcattacgccatcataggagccttgcagggtgatcaatatgacctgatccataagtatgaaaaccaaatcggcgactttcatcttatcttaccattgattcaagatgcgaaaacgtttgaaaaatgccacgctttagaacgtttttgtggtgtttcatgtctgctagaacatgctacaaaatacaacatgctccctattctccaaacataccaagaagagctgtctatgagagcatatcttcgcgaaaccctatttgaactagcgtgcctgtggcagaggtatgatgtccttaaatggatagagcaaaccatgcatgtttacgacctaaagattatgtttaatattgccatctccaagagggatctgacgatgtattccttaggatatattcttctttttgatagagagaacaccgaagctacgttgttaacacaacatctcgagaagacagcggccaaagggctcctctactttgtgctagaaacgttaaaatacggcggtaacatagatatcgtcctgactcaagccgtaaagtacaatcatagaaaacttttagattattttctgcgtcaactacctcgtaaacatattgaaaagcttttgttgctggccgtgcaggaaaaggcttctaaaaaaacattgaacttactgttgtcccatctaaactactccgtgaaacgtatcaaaaaactgctgcgctatgtgatagagtacgagtccaccttggtgataaagattttattaaaaaaaagagtaaacctgatagatgccatgttggaaaagatggtaagatatttttctgcgacgaaagtgaggacgatcatggatgagcttttgattagtccggaaagagtcattaagatggctatacagaaaatgagaacggatatcgtaatccatacttcttatgtttgggaggatgatctagaacgacttactcgtcttaaaaatatggtatacaccataaagtacgaacatgggaaaaaaatgttaattaaagtcatgcacggcatatacaaaaacttattatacgacgaaagagaaaaggtcatgtttcatttagccaagctctatgttgctcaaaacgcggccacccaattcagagacatttgtaaggactgttacaaactggatgtggcacggtttaaaccgcggtttaagcaactaatgttagactgtttagaaattgttactaaaaaatcttgctatagtatcctggaaatcttagaaaaacatattatttccctatttactatgaaagttatgactgaagaggaaaaaaacctatgtttagaaatattatataagtaa

SEQ ID NO: 154 - DNA, 1569 bp, African swine fever virus
atgttttcccttcaagacctttgccgaaagcatctttttattcttcccgatgtttttggcgagcatgtattacaacgattaggactgtattggagatgtcacggctcccttcaacgcgtaggagacgaccacatactcatacggcgggatctcatcctttccaccaacgaggccttaagaatggcgggagaagaaggaaacaatgaagtagtaaagctcttgttactgtggaagggaaatcttcattacgccatcataggagccttgcagggtgatcaatatgacctaatccataagtatgaaaaccaaatcggcgactttcatcttatcttaccattgattcaagatgcgaaaacgtttgaaaaatgccacgctttagaacgtttttgtggtgtttcatgtctgctaaaacatgctacaaaatacaacatgctccctattctccaaacataccaagaagagctgtctatgagagtatatcttcgcgaaaccctatttgaactagcatgcctatggcagaggtatgatgtccttaaatggatagagcaaaccatgcatgtttacgacctaaaggttatgtttaatattgccatctccaagagagatctgactatgtattccttaggatatattcttctttttgatagagagaacaccgaagctacgttgctaacgcaacatctcgagaaaacagcggccaaggggctcctccactttgtgctagaaacgttaaaatacggcggtaacatagatatcgtcctgtcccaagccgtaaagtacaatcatagaaaacttttagattattttctgcgtcaactacctcgtaaaaatattgaaaaacttttgttgctggctgttcaggaaaaggcttctaaaaaaacattgaacttactgttgtcccatttaaactactccgtgaaacgcatcaaaaaactgctgcgctatgtgatagagtacgagtccaccttggtgataaagattttattaaaaaaaagagtaaacctgatagatgccatgttggaaaagatggtaagatatttttctgcgacgaaagtgaggacgatcatggatgagctttcgattagtccggaaagagtcattaagatggctatacagaaaatgagaacagatatcgtaatccatacttcttatgtttgggaggatgatctagaacgacttactcgtcttaaaaatatggtatacgccataaagtatgaacatgggaaaaaaatgttaatgaaagtcatgcacggcatatacaaaaacttattatacggcgaaagagaaaaggtcatgtttcatttagccaagctctatgttgctcaaaacgcggccacccaattcagagacatttgtaaggactgttacaaactggatgtggcacggtttaagcaactaacgttaaactgtttagaaattattactaaaaaatcttgctatagtatcctggaaatcctagaaaaacatattatttccctatttactatgaaagttatgactgaagaagaaaaaaacctatgtttagaaatattatataaagtaattcattataatacaatacaatgttaa

SEQ ID NO: 155 - DNA, 1581 bp, African swine fever virus
atgttttcccttcaagatctttgccgaaagcatctttttattcttcccgatgtttttggcgagcatgtactacaacagttaggactgtactggaaacgtcacggctctcttcaacgcataggagacgaccacatactcatacggcgggacctcatcctttccaccaacgaggccttaaaaatggcgggagaggaaggaaacaatgaagtagtaaagctcttgttactgtgggagggaaaccttcattatgccatcataggggccttacagggtgatcaatatgatctgatccataagtatgaaaaccaaatcgaagactatcatcatatcttgccattgattcaagatgcgaaaacgtttgaaaaatgccacgccttagaacgtttttgtgatgttccatgtctgctagaacatgctacaaaacacaacatgctccctattctccaaaaataccaagaagagctgtctataagagtgtatcttcgcgaaaccctattcgaactagcatgcctatggcagaggtatgatgttcttaaatggatagagcaaaccatgcatgtttacgacctaaagattatgtttaatattgccatctccaagagggatctaagcatgtactccttaggatatgttctcctttttgatagaggaaacatcgaagctacgttcctaacgcaacatctcgagaagacagcggccaaagggctcctccactttgtgctagaaacgttaaaatacggcggtaacttaaatatcgtcctgtcccaagccgtaaaatacaatcatagaaaacttttggattattttctgcgtcaactacctcgtaaaaatattgaaaaacttttgttgctggccgtgcaggaaaaggcttctaaaaaaacattgaacctactgttgtcacacttaaactactccgtgaaacacatcaaaaaactgctgcgctatgtgatagagtacgagtctaccttggtgataaaacttttattgaaaaaaagagtaaacctgatagacgccgtgttggaaaagaatgtaagatatttttctgcgattaaagtgaggactattatggatgagctttcgattagtccggaaagagtcattaagatggccatacagaaaatgagaacggatattgtgattcagacttcttatatttgggaggatgatctagaaagacttattcgtcttaaaaatatggtatacaccataaagtatgaacatgggaaaaaaatgttaattaaagttattcacggcatatacaaaaacttattatacggcgaaaaagaaaaagtcatgtttcatttagccaaactctatgttgctcaaaacgcggccacccaattcagggacatttgtaaggactgttgcaaactggatgtggcgcggtttaaaccgcggtttaaacaactaattttagactgtttagaaatggttactaaaaaatcttgctttagtattatagaaatcttagaaaactatattatttccctatttgtgatgaaagtcatcactgaagaagaaaaaaacctatgtttagaactattatataaagtaattagttacaaaacgatataatgttaa

SEQ ID NO: 156 - DNA, 1581 bp, African swine fever virus
atgttttcccttcaagaccattgccgaaagcatctttttattcttcccgatgtttttggcgagcatgtactacaacggttaggactgtactggggacgtcacggctctcttcaacgaatcggggacgatcacatactcatacggcgggacctcatcctttccaccaacgaggccttaaaaatggcgggagaagaaggaaacaatgaagtagtaaagctcttgttactgtgggagggaaatcttcattatgctatcataggggctttacagggtgatcaatatgacctaatccataagtatgaaaaccaaatcgaagactatcatcatatcttaccattgattcaagatgcggaaacgtttgaaaaatgccacgccttagaacgtttttgtgatgttccatgtctgctagaacatgctacaaaacacaacatgctccctattctccaaaaatatcaagaagagttgtctataagagtgtatctacgcgaaaccctattcgaactagcatgcctatggcagaggtatgatattcttaaatggatagagcaaaccatgcatgtttacgatctaaaaattatatttaatattgccatctccaagagggatctaagcatgtactccttaggatatgttctcctttttgatagagggaacaccgaagctaccttgttaacgcaacacctcgagaagacagcggccaaggggctcctccactttgtgctagaaacgttaaaatacggcggtaacttaaatatcgtcctgttccaagccgtaaaatacaatcatagaaaacttttagattattttctgcgtcaactaccccgtaaaaatattgaaaaacttttgttgctggctgtgcaggaaaaagcttctaagaaaacattgaacttactgttgtcacatttaaactactccgtgaaacgcatcaaaaaactgctgcgctatgtgatagagtacgagtctaccttggtgataaagattttattaaaaaaaagagtaaacctaatagacgccgtgttggaaaagactgtaagatatttttctgagacgaaagtaaagactattatggatgagctttcgattaatccggaaaaagtcattaagatggccatacagaaaatgagaacggatattgtgatccaaacttcttatatttgggaggatgatctagaaagacttattcgtcttaaaaatatggtatacaccataaagtatgaacatgggaaaaaaatgttaatgaaagttattcacggcatatacaaaaacttattacacgatgaaaaagaaaaagtcatgtttcatttagccaagttctatattgctcaaaacgcggccacccaattcagagacatttgtaaagactgttgcaaactggatgtggcgcggtttaaaccgcggtttaaacaactaattttagactgtttagaaattgttactaaaaaatcttgctttagtattatagaaattttagaaaaccatattatttccctatttatgatgaaagttatcactgaagatgaaaaaaacctaggtttagaattattatataaagtaattagttacaaaatgatatcatattaa

SEQ ID NO: 157 - DNA, 1581 bp, African swine fever virus
atgttttcccttcaagacctttgccgaaagcatctttttattcttcccgatgtttttggcgagcacgtactacaacaattggggctgtactgggaaaaacacggctctcttcaacgaatagggaacgatcacatactcatacggcgggatctcatcctttctatcaacgaggccttaaaaatagcggcagaggaaggaaacaatgaagtagtaaagcttttgttactatggaagggaaatcttcattatgccatcataggagctttggagggtgaccaatatgacctgatctatacgtatgaaaaccaaattgaagactatcatcatatcttgccattgattcaagatgcgaaaacgtttgaaaaatgccacgccttggaacgtttttgtgatgttccatgcctgctagagcatgctataaaacacaacatgctccctattctccaaaaatatcaagaagaactgtttataagagtgtatctccgcgaaaccctatttgaactagcatgcctatggcagaggtatgatattcttaaatggatagagcaaaccatgcatgtttacgatctaaaaattatatttaatattgccatctccaagagggatctaagcatgtactccttaggatatgttctcctttttgatagagggaacaccgaagctaccttgttaacgcaacacctcgagaagacagcggccaaggggctcctccactttgtgctagaaacgttaaaatacggcggtaacataaacatcgtcctatcccaagccgtaaaatacaatcataggaaacttttagattattttctgcgtcaactacctcgtaaaaatattgaaaaacttttgttgttagccgtacaggaaaaggcttctaagaaaacattgaacttactgttgtcttatttaaactactccgtgaaacgcatcaaaaaactgctgcgctatgtgatagagtacgagtccacactggtgataaggattttattaaaaaaaagaataaacctaatagacgccgtgttggaaaagactgtaagatatttttctgagacgaaagtaaagactattatggatgagctttcgattaatccggaaaaagttattaagatggccatacagaaaatgagaacggatattgtgatccaaacttcttatatttgggaggatgatctagaaagacttattcgtcttaaaaatatggtatacaccataaagtatgaacatgggaaaaaaatgttaatgaaagttattcacggcatatacaaaaacttattacacgatgaaaaagaaaaagtcatgtttcatttagccaagttctatattgctcaaaacgcggccacccaattcagagacatttgtaaagactgttgcaaactggatgtggcgcggtttaaaccgcggtttaaacaactaattttagactgtttagatattattactaaaaaaacgtgcctcaatattatggaaatcttagaaaatcatattatttcgctatttgctatgaaaatgatgactgaagatgaaaaaaacctaggtttagaattattatataaagtaattagttacaaaatgatatcatattaa

SEQ ID NO: 158 - DNA, 1575 bp, African swine fever virus
atgttttcccttcaagacctttgccgaaagcatctttttattcttcccgatgtttttggcgagcatgtactacaacaattggggctgtactgggaaaaacacggctctcttcaacgaatagggaacgatcacatactcatacggcgggatctcatcctttctatcaacgaggccttaaaaatagcggcagaggaaggaaacaatgaagtagtaaagctcttgttactgtggaagggaaatcttcattatgccatcataggagccttgcagggtgaccaatatgacctcatccatacgtacgaaaaccaaatcgaagactatcatcatatcttgccattgattcaagatgcgaaaacgtttgaaaaatgccacgccttggaacgtttttgtgatgttccatgcctactagaacatgctacaaaacacaacatgctccctattctccaaaaataccaagaagagctgtttataagagtgtatctccgcgaaaccctatttgaactagcatgcctatggcagaggtatgatatccttaaatggatagagcaaaccatgcatgtttacgacctaaagattatgtttaatattgccatctccaagagggatctaagcatgtactctttagaatatattctcttttttaatagagggaacaccgatgttgcgttagcaacgttgctaacgcaacatctcgagaagacagcggccaaggggctcctccactttgtgctagaaacgttaaaatacggcggtaacataaacatcgtcctctcccaagccgtaaaatacaatcatagaaaacttttagattattttctgcgtcaactacctcgtaaaaatattgaaaaacttttgttgctggccgtacaggaaagggcttctaagaaaacattgaacttactgttgtcttatttaaactactccgtgaaacgcatcaaaaaactgctgcgctatgtgatagagcatgagtccacactggtgataaggattttattaaaaaaaagaataaacctaatagacgccgtgttggaaaagactgtaagatatttttctatgactaaagtgaggacgatcatggatgagctttcgattaatccggaaaaagtcattaaaatggccgtgcagaaaatgagaacggatatcgtgatccatacttcttatgtttgggaggatgatctagaaagacttattcgtcttaaaaatatgctatacactataaagtatgagcatggaaaaaaaatgctaattaaagtcattcacggcatatacaaaaacttatacggcgaaaaagaaaaagtcatgtttaatttggccaagttctatgctgctcaaaacgcggccacccaattcaaagacacttgtaaagactgttgcaaactggatgtggcgcggtttaaacaactaattttagactgtttagacattattactaaaaaaacgtgcctcagtatcatggaaatcttagaaaatcatattatttcgctatttgctatgaaaatgatgacggaggatgaaaaaaacttaggtttagaaatattatataaagtaattagttacaaaatgatatcatattaa

SEQ ID NO: 159 - protein, 350 aa, African swine fever virus
MLPSLQSLTKKVLAGQCVPTNQHYLLKCYDLWWHDAPITFDHNLRLIKSAGIKEGLNLNTALVKAVRENNYNLIKLFAEWGADINYGLVSVNTEHTWDLCRELGAKETLNEEEILQIFIDLKFHKTSSNIILCHEVFSNNPILQKVNNIKMRIEIFWELRELIVKTDLLNNEFSLSTLLLKYWYAIAIRYNLKEAIQYFYQKYTHLNTWRLTCALCFNNVFDLHEAYEKDKIHMDIEEMMRIACIKDHNLSTMYYCYVLGANINQAMLSSIQYYNIENMFFCIDLGADVFEEGTTALGEGYELIKNILSLKIYSPATTPLPKSTDPEIIDHALKNYVSKNMMIFLTYDLR

SEQ ID NO: 160 - protein, 350 aa, African swine fever virus; identical to SEQ ID NO: 159

SEQ ID NO: 161 - protein, 350 aa, African swine fever virus
MLPSLQSLTKKVLAGQCVPTNQHYLLKCYDLWWHDAPITFDHNLRLIKSAGIKEGLNLNTALVKAVRENNYNLIKLFAEWGADINYGLVSVNTEHTWDLCRELGAKETLNEEEILQIFIDLKFHKTSSNIILCHEVFSNNPILQKVNNIKMRIEIFWELRELIEKTDLLNNEFSLSTLLLKYWYAIAIRYNLKEAIQYFYQKYTHLNTWRLTCALCFNNVFDLHEAYEKDKIHMDIEEMMRIACIKDHNLSTMYYCYVLGANINQAMLSSIQYYNIENMFFCIDLGADVFEEGTTALGEGYELIKNILSLKIYSPATTPLPKSMDPEIIDHALKNYVSKNMMIFLTYDLR

SEQ ID NO: 162 - protein, 350 aa, African swine fever virus
MLPSLQSLTKKVLAGQCVPTNQHYLLKCYDLWWHDGPITFDHNLKLIKSAGIKEGLDLNTALVKAVRENNYNLIKLFAEWGANINYGLVSVNTEHTRDLCRELGAKETLNEEEILQIFIDLKFHKTSSNIILCHEVFSNNPILQKVNNIKMRIEIFWELRELIEKTDLLNNEFSLSALLLKYWYAIAIRYNLKEAIQYFYQKYTHLNTWRLTCALCFNNVFDLHEAYEKDKIHMDIEEMMRIACIKDHNLSTMYYCYVLGANINQAMLTSIQYYNIENMFFCMDLGADAFEEGTIALGEGYKLIKNILSLKIYSPATTPLPKSTDPEIIDHALKNYVSKNMMIFLTYDLR

SEQ ID NO: 163 - protein, 350 aa, African swine fever virus
MLPSLQSLTKKVLAGQCVPTNQHYLLKCYDLWWHDGPITFDHNLKLIKSAGIKEGLDLNTALVKAVRENNYNLIKLFAEWGADINYGLVSVNTEHTRDLCRELGAKETLNEEEILQIFIDLKFHKTSSNIILCHEVFSNNPILQKVNNIKMRIEIFWELRELIEKTDLLNNEFSLSTLLLKYWYAIAIRYNLKEAIQYFYQKYTHLNTWRLTCALCFNNVFDLHEAYEKDKIYMDIEEMMRIACIKDHNLSTMYYCYVLGANINQAMLTSIQYYNVENMFFCMDLGADAFEEGTIALGEGYKLIKNILSLKIYSPATTPLPKSTDPEIIDHAVKNYVSKNMMIFLTYDLR

SEQ ID NO: 164 - protein, 350 aa, African swine fever virus
MLPSLQSLTKKVLAGQCVPTNQHYLLKCYDLWWHDGPITFDHNLKLIKSAGIKEGLDLNTALVKAVRENNYNLIKLFAEWGANINYGLVSVNTEHTWDLCRELGAKETLNEEEILQIFIDLKFHKTSSNIILCHEVFSNNPILQKVNNIKMRIEIFWELRELIEKTDLLNNEFSLSTLLLKYWYAIAIRYNLKEAIQYFYQKYTHLNTWRLTCALCFNNVFDLHEAYEKDKIHMDIEEMMRIACIKDHNLSTMYYCYVLGGNINQAMLTSIQYYNIENMFFCMDLGADAFEEGTIALGEGYKLIKNILSLKIYSPATTPLPKSTDPEIIDHALKNYVSKNMMIFLTYDLR

SEQ ID NO: 165 - protein, 350 aa, African swine fever virus
MLPSLQSLTKKVLAGQCVPTNQHYLLKYYDLWWHDAPITFDHNLRLIKSAGIKEGLDLNTALVKAVKENNYNLIKLFAEWGADINYGLVSVSSEHTWDLCRELGAKETLNEKEILQIFIDLKFHKTSSNIILCHEVFSNNPILQKVNNIKMRIEIFWELRELIEKTDLLNNEFSLSTLLLKYWYAIAIRYNLKEAIQYFYQKYTHLNTWRLTCALCFNNVFDLHEAYEKDKIYMDIEEMMRIACIKDHNLSTMYYCYMLGANINQAMLTSIQYYNIENMFFCMDLGADVFEEGTTALGEGYELIKNILSLKIYSPTTIPLPKSTDPEIIDHALKNYFSKNMMIFLSYDLR

SEQ ID NO: 166 - protein, 350 aa, African swine fever virus
MLPSLQSLTKKVLAGQCVPTNQHYLLKYYDLWWYNAPITFDHNLRLIKSSGIKEGLDLNTALVKAVRENNYSLIKLFTEWGADINYGLVSVNTEHTRDLCQELGAKEILNEEEILQIFIDLKFHKTSSNIILCHEVFSNNPILQKVNNLKLRIEIFWELRELIEKTDLLNNEFLLSTLLLKYWYAIAVRYSLKEAIQYFYQKYTHLNTWRLTCALCFNNVFDLHEAYEKDKIHMDIEEMMRIACIKDHNLSTMYYCYMLGANINQAMLTSIQYYNIENMFFCMDLGADVFEEGTTALGEGYELIKNILSLKIYSPTTIPLPKSTDPEIIDHALKNYFSKNMMIFLSYDLR

SEQ ID NO: 167 - protein, 349 aa, African swine fever virus
MLPSLQSLTKKVLAGQCLPTDQYYLLKCYDLWWYDSPITFDHNLGLIKSAGIKDGLDLNTALVKAVRENNYNLIKLFTEWGADINYGLVSVNTEHTRDLCRELGAKETLNEEEILRIFIDLKFYKTSSNIILCHEVFSNNPLLQKVNNLKMRIEIFWELRELIKKTDLLNNEFSLNTLLLKYWYAIAVRYNLKEAIQYFYQKYTHLNTWRLTCALCFNNVFDLHEAYEKDKIYMDLEEMMRVACIKDHNLSTIYYCYVLGANINQAMLASIQYYNIENMFFCMDLGADVFEENMPVGEGYELIRNILSLKIYSPSTAPLPKNTDPEIIDHVLKNYKSKNMMTFLSYDLR

SEQ ID NO: 168 - protein, 351 aa, African swine fever virus
MLPSLQSLTKKVLAGQCLPEDQHYLLKCYDLWWNNAPITFDHNLRLIKSAGLQEGLDLNMALVKAVKENNYSLIKLFTEWGANINYGLISVNTEHTWDLCRELGAKKTLNEGDILQIFIDLKFHKTSSNIILCHEVFSDNLLLKKVNNLKMRIEIFWELREIIEKTDLLNNEFSLNTLLLKYWYAIAVRYNLKEAIQYFYQKYTHLNTWRLTCALCFNNVFDLHEAYEKDKICMDLEEMMRIACIKDHSLSTIYYCYMLGANINQAMLTSIQYYNIENIFFCMDLGADAFEEGMALVGQEGYEPIRNILSLKIYSPATTPLPKSTDPEIIDHELKNYFSKNMMVFLTYDLR

SEQ ID NO: 169 - protein, 351 aa, African swine fever virus
MLPSLQSLTKKVLARQCLPEDQHYLLKCYDLWWNNAPITFDHNLRLIKLAGIQEGLDLNMALVKAVKENNYSLIKLFTEWGANINYGLISVNTEHTWDLCRELGAKKTLNEGDILQIFIDLKFYKTSSNIILCHEVFSDNLLLKRVNNLKMRIEIFWELREIIEKTDLLNNEFSLNTLLLKYWYAIAVRYNLKEAIQYFYQKYTHLNTWRLTCALCFNNVFDLHEAYEKDKICMDLEEMMRIACIKDHNLSTIYYCYMLGANINQAMLTSIQYYNIENIFFCMDLGADAFEEGMALVGQEGYEPIRNILSLKIYSPATTPLPKSTDPEIIDHALKNYFSKNMMVFLTYDLR

SEQ ID NO: 170 - protein, 353 aa, African swine fever virus
MSLPLSLQTLVKKTIASQCLSIDEHCILKYCGLWWHDAPLKLCMDRGRIQIKSGFLGEDIDLRVALIIAVKENNYSLIKLFTEWGANINYGLLSINTKHIRELCRQLGAKETLEDNDIFRIFTRIMHNKTSGSIILCHEIFMNNPILENKFVIQLRGLIYKRLWGLIEIKETDELNGLLVKYWYAKAVQYDCKDAICFLDEKYTDLNEWRLKCLLYYNKIYELHEMYHKENIQIDVHDMICLASTKDNNPLTIYYCYALGGNINQAMLTSVQYYNIGNIFFCIDLGGNAFEEGRAIAEQKGYNFLSHSLALDIYSSDASLPLNLKDPEEISSLLKDYKSKNLSIIWEYSHNIL

SEQ ID NO: 171 - protein, 353 aa, African swine fever virus; identical to SEQ ID NO: 170

SEQ ID NO: 172 - protein, 353 aa, African swine fever virus
MSLPLSLQTLVKKTVANQSLSIDEHCILKHCGLWWHDVPLKLCMDRGQIQIKSGFLGEDIDLHIALIIAVKENNYSLIKLFTEWGANINYSLLSINTKHIRELCRQLGAKETLEDDDIFRIFTKIMHNKTSGSIILCHDIFMNNPNIEDKFTIQLRGLIYKRLWGLIEIKETDELNGLLVKYWYAKAVQYECKDAICFLDEKYTDLNEWRLKCLLYYNKIYELHEMYHKENIQIDVHDMICLASTKDNNPLTIYYCYALGGNINQAMLTSVQYYNIGNIFFCIDLGGNAFEEGRAIAEQKGYNFLSHSLALDIYSSDASLPLNLKDPEEISSLLKDYKSKNLSIIWEYSHNIL

SEQ ID NO: 173 - protein, 353 aa, African swine fever virus
MSLPLSLQTLVKKTVASQCLSTDEHCILKHCGLWWHDVPLKLCMDRGQIQIKSGFLGEDIDLHIALIIAVKENNYSLIKLFTEWGAHINYSLLSINTEHIRELCRQLGAKETLEDNDIFRIFTKIMHNKTSGRIILCHEIFMNNPNIENKFTIQLRGLICKRLWGLIEIKETDELNDLLVKYWYAKAVQYECKDAICFLDEKYTDLNEWRLKCLLYYNKIYELHEMYHKEKVQIDVHDMICLASTKDNNPLTIYYCYALGGNINQAMLTSVQYYNIGNIFFCIDLGGNAFEEGRAIAEQKGYHFLSHSLTLDIYSSDASLPLNLKDPEEISSLLKDYKSKNLSIIWEYSHNIL

SEQ ID NO: 174 - protein, 353 aa, African swine fever virus
MSLPLSLQTLVKKTVASQCLSTDEHCILKHCGLWWHDVPLKLCMDRGQIQIKSGFLGEDIDLHVALIIAVKENNYSLIKLFTEWGAHINYSLLSINTEHIRELCRQLGAKKTLEDNDIFRIFTKIMHNKTSGRIILCHEIFMNNPNIENKFTIQLRGLICKRLWRLIEIKETDELNDLLVKYWYAKAVQYECKDAICFLDEKYTGLNEWRLKCLLYYNKIYELHEMYHKDKVQIDVHDMICLASTKDNNPLTIYYCYALGGNINQAMLTSVQYYNIGNIFFCIDLGGNAFEEGRAIAEQKGYHFLSHSLALDIYSSDASLPLNLKDPEEISSLLKGYKSKNLSIIWEYSHNIL

SEQ ID NO: 175 - protein, 353 aa, African swine fever virus
MSLPLSLQTLVKKTVASQCLSIDEHCILKHCGLWWHDVPLKLCMDRGQIQIKSGFLGEDIDLHIALIIAVKENNYSLIKLFTEWGAHINYSLLSINTEHIRELCRQLGAKETLEDDDVFRIFTKIMHNKTSGRIILCHDIFMNNPNIENKFTIQLRGLICKRLWGLIEIKETDELNDLLVKYWYAKAVQYECKDAICFLEEKYTDLNEWRLKCLLYFNKIYELHEMYHKEKVQIDVHDMICLASTKDNNPLTIYYCYALGGNINQAMLTSIQYYNIGNIFFCIDLGGNAFEEGRAIAEQKGYNFLSHSLALDIFSSDASLPLNLKDPEEISSFLKDYKSKNLSIIWEYSHNIL

SEQ ID NO: 176 - protein, 353 aa, African swine fever virus
MSLPLSLQTLVKKTVASQCLSIDEHCILKYCGLWWHDAPLKLCMDRGRIQIKSGFLGEDIDLRVALIIAVKENNYSLIKLFTEWGANINYSLLSINTKHIRELCRQLGAKETLEDNDIFRIFTRIMHNKTSGSIILCHEIFMNNPILENKFVIQLRGLIYKRLWGLIEIKETDKLNDLLVKYWYAKAVQYVCKNAICFLDEKYTDLNEWRLKCLLYYNKIYELHEMYHKKKVQIDVHDMICLACAKDNNLLTIYYCYALGSNINQAMLTSVQYYNIGNIFFCIDLGGNAFEEGRAIAEQKGYNFLSHSLTLDIYSSDASLPLNLKDPEEISSLLKDYKSKNLSIIWEYSHNIL

SEQ ID NO: 177 - protein, 353 aa, African swine fever virus; identical to SEQ ID NO: 7

SEQ ID NO: 178 - protein, 353 aa, African swine fever virus
MSAPLSLQTLVKKTVASTSCLSIDEHILKYCDLWWHDAPLKLYMDRGRIQIKSGFLGEDIDLCVALIIAVKENNYNLIKLFTELGANINYSLLSINTKHVRDLCRQLGAKETLEDYDIFCIFNKIMHNKTSGSVILCHEIFINNPNLENKFAAQLRRLIYKRLCGLIEIKETDELSELLVKYWYAKAVQYDYKDAICFLDEKYTDLNEWRLKCYLYYNKIYELHDIYHKEKIQIDVNEMLSLACIRDNNPLTIYYCYALGGNINQAMLTSVQYYNIGNIYFCIDLGGNAFEEGSAIARQKGYNFLSHSLVLNIYSSDASLPLNLKDPEEISSLLKNYKSKNLSIILDYSHNIL

SEQ ID NO: 179 - protein, 353 aa, African swine fever virus
MSSPLSLQTLVKKTVASTSCLSIDEHILKYCGLWWHDAPLKLYIDRGRIYIKSGFLGEDIDLCVALIIAVKENNYSLIKLFTEWGAYINYSLLSINTKHARDLCRQLGAKETLDDYDIFCIFNKIMHNKTSGSIILCHEIFINNPKLENNFAAQLRRLIYKRLCGLIEIKETDELSELLVKYWYANAVQYDHKDAICFLDEKYTDLDEWRLKCYLCYNKIYELHDIYHKKKIQIDVNEMLSLACIRDNNLLTIYYCYALGGNINQAMLTSVQYYNIGNIYFCIDLGGNAFEEGSAIARQNGYNFLCHSLILNIYSSDASLPLNLKVPEEISSLLKNYKSKNLSIILDYSHKIL

SEQ ID NO: 180 - protein, 352 aa, African swine fever virus
MSSPLSLQTLVKKTVAGTSCLSIDEHILKYCGLWWHDAPLKLYIDRGRIYIKSGFLGEDIDLCVALIIAVKENNYSMIKLFTEWGAYINYSLLSINTKHARDLCRQLGAKETLDDYDIFCIFNKIMHNKTSGSIILCHEIFINNPNLENNFAAQLRRLIYKRLCGLIEIKETDELSELLVKYWYANAVQYDHKDAICFLDEKYTDLDEWLKCYLCYNKIYELHDIYHKEKIQIDVNEMLSLACIRDNNLLTIYYCYALGGNINQAMLTSVQYYNIGNIYFCIDLGGNAFEEGSAIARQNGYNFLSHSLVLNIYSSDASLPLNLKDPEEISSLLKNYKSKNLSIILDYSHKIL

SEQ ID NO: 181 - protein, 357 aa, African swine fever virus
MLSLQTLAKKVVACNYLSSDYDYTLQRFGLWWDLGPIHLCNNCKQVFSYKHLQCFSEDDLCLEAALVKAVKSDNLELIRLFVDWGANPEYGLIRVPAVYLKRLCAELGGLTPVSEPRLLEILKEVARLKSCAGVLLGYDMFCHNPLLETVTRTTLDTVTYTCSNIPLTGDTAHHLLTKFWFALALRHNFTKAIHYFYKRHKNHLYWRVACSLYFNNIFDIHELCREKEICISPNLMMKFACLREKNYAAIYYCHRLGASLDYGMNLSIYNNNTLNMFFCIDLGAADFDRAQLIAHKAYMYNLSNIFLVKQLFSRDVTLVLDVTEPQEIYDMLKTYTSKNLKRAEEYLTAHPEIIVID

SEQ ID NO: 182 - protein, 357 aa, African swine fever virus; identical to SEQ ID NO: 181

SEQ ID NO: 183 - protein, 357 aa, African swine fever virus
MLSLQTLAKKVVACNYLSSDYDYTLQRFGLWWDLGPIHLCNNCKQIFSYKHVQCFSEDDLCLEAALVKAVKSDNLELIRLFVDWGANPEYGLIRVPAVHLKRLCTELGGLTPVSESRLLEILKEVARLKSCAGVLLGYDMFCHNPLLETVTRTTLDTVTYTCSNIPLTGDTAHHLLTKFWFALALRHNFTKAIHYFYKRHKNHLYWRVACSLYFNNIFDIHELCREKEICISPNLMMKFACLQKKNYAAIYYCYRLGASLDYGMNLSIYNNNTLNMFFCIDLGATDFDRAQRIAHKAYMYNLSNIFLVKQLFSRDVTLALDVTEPQEIYDMLKSYTSKNLKRAEEYLTAHPEIIVID

SEQ ID NO: 184 - protein, 357 aa, African swine fever virus
MLSLQTLAKKVVACNYLSSDYDYMLQRFGLWWDLGPIHLCNNCKQIFSYKHLQCFSEDDLCLEAALVKAVKSDNLELIRLFVDWGANPEYGLIRVPAVHLKRLCTELGGLTPVSEPRLLEILKEVAKLKSCAGVLLGYDMFCHNPLLETVTRTTLDTVTYTCSNIPLTGDTAHHLLTKFWFALALRHNFTKAIHYFYKRHKNHLYWRVACSLYFNNIFDIHELCREKEICISPNLMMKFACLRKKNYAAIYYCYRLGASLDYGMNLSIYNNNTLNMFFCIDLGATDFDRAQRIAHKTYMYNLSNIFLVKQLFSRDVTLALDVTEPQEIYDMLKSYTSKNLKRAEEYLTAHPEIIVID

SEQ ID NO: 185 - protein, 357 aa, African swine fever virus
MLSLQTLAKKVVACNYLSSDYDYMLQRFGLWWDLGPIHLCNNCKQIFSYKHLQCFSEDDLCLEAALVKAVKRDNLELIRLFVDWGANPEYGLICVPTVHLKRLCTELGGLTPVSEPRLLEILKEVANLKSCAGVLLGYDMFCYNPLLETITRTTLDTVMYSCSKIPLMGDTAHHLLTKFWFALALRHNFTKAIHYFYKRHKNHLYWRVACSLYFNNIFDIHELCREKEICISPNLMMKFACLREKNYAAIYYCYRLGASLDYGMNLSIYNNNSLNLFFCIDLGATDFDRAQRIAHKAYMYNLSNILLVKQLFSRDVTLALDVTEPQEIYDRLKAYTSKNMKRAEEYLTAHPEIIVID

SEQ ID NO: 186 - protein, 357 aa, African swine fever virus
MLSLQTLAKKVVACNYLSSDYDYTLQRFGLWWDLGPIHLCNNCKQIFSYKHLQCFSEDDLCLEAALVKAVKSDNLELIRLFVDWGANPEYGLIRVPAVHLKRLCTELGGLTPVTEPRLLEILKEVAKLKSCAGVLLGYDMFCHNPLLETVTRTTLDTVTYTCSNIPLTGDTAHLLLTKFWFALALRHNFTKAIHYFYKRHKNHLYWRVACSLYFNNIFDIHELCREKEICISPNLMMKFACLQKKNYAAIYYCYRLGASLDYGMNLSIYNNNTLNMFFCIDLGATDFDRAQHIAHKAYMYNLSNIFLVKQLFSRDVTLALDVTEPQEIYDRLKSYTSKNLKRAEEYLTAHPEIIVID

SEQ ID NO: 187 - protein, 357 aa, African swine fever virus; identical to SEQ ID NO: 8

SEQ ID NO: 188 - protein, 357 aa, African swine fever virus; identical to SEQ ID NO: 8

SEQ ID NO: 189 - protein, 357 aa, African swine fever virus
MLSLQTLAKKVVACNYLSSDYDYTLQRFGLWWDLGPIHLCNTCKQIFSYKHLQCFSEDDLCLEAALVKAVKSDNLELIRLFVDWGANPEYGLIRVPAVHLKRLCMELGGLTPVSESRLLEILKEVADLKSCAGVLLGYDMFCHNPLLETVTRTTLDTVMYTRSKIPLTGDTAHLLLSKFWFALALRHNFTKAIHYFYEKHKNQLYWRLTCSLYFNNIFDLHELCCKKEICISPNLMMKFACLREENYAAIYYCHMLGASLDYGMNLSIYNNNTLNLFFCIDLGATNFDRARLIARRVYMYNLSNLFLVKQLFSRDVSLILDLTEPQAIYDMLNTYTSKNLKQAEEYFTAHPEIVVID

SEQ ID NO: 190 - protein, 357 aa, African swine fever virus
MLSLQTLAKKVVACNYLSSDYDYTLQRFGLWWDLGPIHLCNTCKQIFSYQHLQCFSEDDLCLDAALVKAVKSDNLELIRLFVDWGANPEYGLIRVPAVDLKRLCTELGGLTPVSESRLLEILKEVADLKSCAGVLLGYDMFCHNPLLETVTRTTLNTVMYTRSKIPLTGDTAHLLLTKFWFALALRHNFTKAIHYFYEKHKNQLYWRLACSLYFNNIFDLHELCSKKEICISPNLMMKFACLREENYAAIYYCHMLGASPDYGMNLSIYNNNTLNLFFCIDLGATNFDRARLIAHRVYMYNLSNIFLVKQLFSRDASLVLNITEPQAIYDMLKTYTSKNLKRAEEYFTAHPEIVVID

SEQ ID NO: 191 - protein, 357 aa, African swine fever virus
MLSLQTLAKKVVACNYLSSDYDYTLQRFGLWWDLGPIHLCNTCKQIFSYQHLQCFSVDDLCLDAALVKAVKSDNLELIRLFVDWGANPEYGLIRVPAVHLKRLCTELGGLTPVSESRLLEILKEVADLKSCAGVLLGYDMFCHNPLMETVTRTTLNTVMYTRSKIPLTGDTAHLLLTKFWFALALRHNFTKAIHYFYEKHKNQLYWRLTCSLYFNNIFDLHELCSKKEICISPNLMMKFACLREENYAAIYYCHMLGASPDYGMNLSIYNNNTLNLFFCIDLGATNFDRARLIAHRVYMYNLSNIFLVKQLFSRDASLVLNITEPQAIYDMLKTYTSKNLKRAEEYFTAHPEIVVID

SEQ ID NO: 192 - protein, 531 aa, African swine fever virus
MFSLQNLCRKTLPNRKLPEFFDEYILQLLGLYWENHGTIQRAGNNCVLIQQHTLIPVNEALRTAASEENYEIVSLLLAWEGNLYYAIIGALEGNRHDLIRKYDDQIKDHHEILPFIDDPVIFHKCHIMRQCFFDCILYQAVKYSKFRVLLYFKHRLEDDLPFTHLLIEKACKDHNYEVIKWIYENLHIYNMIDTFECAIAHKDLHLYCLGYRFIYNRIVPDKYHHLDIRMLSSLQLLHKVAAKGYLDFILETLKYDHNKDNINIILTQAATYNHRKILIYFIPQSTHAQIEQCLLVAIKAKSSRKTLNLLLSHLNLSINLIKKISHYVATYNSTNIIGILSMRRKKKIYLDIILTKFVKKAIFNKFVVRCMDTFSINPERILKIAARINRMMLVKKISEHVWKNHAVRLKYLKHAVHTMKHKDGKNRLMNFIYDRCYYHMQGEEIFSLARFYAIHHAPKLFDVFYDCCILDTIRFKSLLLDCSHIIGKNAHDATNINIVNKYIGNLFVMGVLSKKEILQDYPSIYSKQYMP

SEQ ID NO: 193 - protein, 531 aa, African swine fever virus; identical to SEQ ID NO: 192

SEQ ID NO: 194 - protein, 531 aa, African swine fever virus
MFSLQNLCRKTLPDCKLPEFFDEYILQLLGLYWENHGTIQRAGNNCVLIQQHNLIPVNEALRIAASEENYEIVSLLLAWEGNLYYAIIGALEGNRHDLIRKYDDQIKDHHEILPFIDDPVIFHKCHIMRQCFFDCILYQAVKYSKFRVLLSFKHRLRDDLPFTHLLIEKACKDHNYEVIKWIYENLHIYNMIDTFECAIAHKDLRLYCLGYRFIYNRIVPDKYHHLDIRMLSSLQLLHKVAAKGYLDFILETLKYDHNKDNINIILTQAATYNHRKILIYFIPQSTHAQIEQCLLVAIKTKSSKKTLNLLLSHLNLSINLIKKISHYVATYNSTNIIGILSMRRKKKIYLDIILTKFVKKAIFNKFVVRCMDTFSINPERILKIAARINRTMLVKKISEHVWKNHAVRLKYLKHAVHTMKHKDGKNRLMNFIYDRCYYHMQGEEIFSLARFYAIHHAPKLFDVFYDCCILDTIRFKSLLLDCSHIIGKNAHDATNINIVNKYIGNLFVMGVLSKKEILQDYPSIYSKHYMP

SEQ ID NO: 195 - protein, 531 aa, African swine fever virus
MFSLQNLCRKTLPDCKLPEFFDEYILQLLGLYWENHGTIQRAGNNCVLIQQRTLIPVNEALRIAASEENYEIVGLLLAWEGNLYYAIIGALEGNRHDLIRKYDDQIKDHHEILPFIDDPVIFHKCHIIRRCFFNCILYQAVKYSKFRVLLYFKHRLEDDLPLTHLLIEKACEDHNYEVIKWIYENLHTYDIMDTFECAIAHKDLRLYCLGYTFIYNRIVPYEYHHLDILILSSLQLLHKVAAKGYLDFILETLKYDHNNDNLDIILTQAATYNHRKILTYFIPQLTYAQIEQCLFMAIKRKSSKKTLNLLLSHLTLSIELIKKISQYVVTYNSTNIIGILSMKRKKKIYLDIMLTKYVKYAIFNKYVVRCMDRFSINPERIIKMAARINRMMLVKKISEHVWKNHAARLKHLKHAVHTMKHKDGKNRLMNFIYDRCYYHMQGEEIFSLARFYAIHHAPKLFDVFYDCCILDTIQFKSLLLDCSHIIGKNAHDATNINIVNKYIGDLFAMGVLSKKEILQDYPSIYSKHYML

SEQ ID NO: 196 - protein, 531 aa, African swine fever virus
MFSLQNLCRKTLPDCKLPEFFDDYILQLLGLYWENHGTIQRAGNNCVLIQQHTLIPINEALRTAASEENYEIVSLLLAWEGNLYYAIIGALEGNRHDLIRKYDDQIKDHHEILPFIDDPVIFHKCHIMRRCFFDCILYQAVKYSKFRVLLYFKYRLEDDLPLTHLLIEKACENHNYEVIRWIYENLHIYNMIDTFECAIAHKDLRLYCLGYTFIYNRIVPNKYHHIDILILSSLQLLHKVAAKGYLDFILETLKYDHNNDNLDIILTQAATYNHRKILTYFIPQSTYAQIEQCLMVAIKTKSSKKTLNLLLSHLNLSIKLIKKISQYVVTYNSTNIIGILSMKRKKKIYLDILLTKFVKNAIFNKFVVRYMDTFSINPEKIVKMAARINKMMLVKKISEHIWKNHAARLEHLKHAVHTMKHKDGKNRLMNFIYEYCYYHMQGEEIFSLARFYAIHHAPKLFDVFYNCCILDTIRFKSLLLDCSHIIGKNAHDATNINIVNKYIDNLFAMGVLSKKEILQDYPSIYSKHYMP

SEQ ID NO: 197 - protein, 531 aa, African swine fever virus
MFSLQNLCRKTLPDCKLPEFFDEYILQLLGLYWENHGTIQRAGNNCVLIQQHTLIPVNEALRIAASEENYEIVSLLLAWEGNLYYAIIGALEGNRHDLIRKYDDQIKDHHEILPFIDDPVIFHKCHIMRRCFFDCILYQAVKYSKFRVLLYFKYRLENDLPLAHLLIKKACEDHNYEVIKWIYENLHIYNIMDTFGCAIAHKDLRLYRLGYTFIYNRIVPYKYHYLDVLILSGLHLLYKVAAKGYLDFILETLKYDHNNDNLDIILTQAATYNHRKILTYYIPQLTYAQIEQCLFMAIKKKSSKKTLNLLLSHLKLSIKLIKKISQYVATYNSTNIIGILNMRRKKKIYLDIILTKFVKKAIFNKFVVRCMDTFSINPERIIKMAARINKMLLVKKISEHAWKNHAARLKHLKHAVYTMKHKDGKNRLMNLIYDHYYYHMQGEEIFSLARFYAIHHAPKLFDVFYDCCLLDTIRFKNLLLDCSHIIGKNAHDATNITIVNKYIGNLFAMGVLSKKEILQDYPSIYSKHYMP

SEQ ID NO: 198 - protein, 531 aa, African swine fever virus; identical to SEQ ID NO: 9

SEQ ID NO: 199 - protein, 531 aa, African swine fever virus
MFSLQNLCRKTLPDCKLPEFFDEYILQLLGLYWENHGTIQRAGNNCVLVQQHTLIPVNEALRIAASEENYEIVSLLLAWEGNLYYAIIGALEGNRHDLIRKYDDQIKDHHEILPFIDNPVIFHKCHIMRRCFFDCILYQAVKYSKFRVLLYFKYRLENDLPLAHLLVEKACEDHNYEVIKWLYENLHIYNIMETFECAIAHKDLRLYRLGYTFIYNRIVPYKYHYLDVLILSGLHLLYKVAAKGYLDFILETLKYDHNNDNLDIILTQAVTYNHRKILTYYIPQLTYAQIEQCLFMAIKKKSSKKTLNLLLSHLKLSIKLIKKISQYVATYNSTNIIGILNMKRKKKIYLDIILTKFVKYAIFNKYVVRCMDTFSINPERIIKMAARINKMLLVKKISQHAWKNHAARLKHLKHAVYTMKHKDGKNRLMNLIYDHYYYHMQGEEIFSLARFYAIHHAPKLFDVFYDCCLLDTIRFKSLLLDCSHIIGKNAHDATNITIVNKYIGNLFAMGVLSKKEILQDYPSIYSKHYMP

SEQ ID NO: 200 - protein, 530 aa, African swine fever virus
MFSLQNLCRKTLPDRKLPEFFDDYVLQLLGLYWENHGTIQRAGNNCVLIQQHNLIPVNEALRIAASEENYEIVSLLLAWEGNLYYAIIGALEGNRHNLIRKYDDQIKDHHEILPFIDDPVIFHKCHMMRRCFFNCILYQAVKYSKFSVLLYFKYILKENLPLVHSLIEKACEDHNYEVIKWIYENLHIYEIMDTFKCAIAHKDLHLYSLGYTFIYNRIVPYKYHHLDIRILSRLQLLHKVTAKGYLDFILETLKYDHNKDNINIILTQAATYNHRNILTYFIPQSTYAQIEQCLFVAIKTNASKKTLNLLLSHLNLSIKLVKKLSQYVVAYKSTNIISILSMQQKKKIYLDIILTKVVKNAIFIKFVIGCMVTFSINPERIVKMAARIKKMKLVKNISEHVWKNHAAKLKHLKHAVHTMKHQEGKNRLMNFIYDHCYYHMQGEEIFSLARFYAIHHAPKLFDVFYDCCILDTIRFKSLLLDCSYIIAKNAHDASINIVNKYIGNLFAMGVLSKKEILQDYPSIYSKDYML

SEQ ID NO: 201 - protein, 530 aa, African swine fever virus
MFSLQNLCRKTLPDCKLPEFFDDYVLQLLGLYWENHGTIQRAGNNCVLIQQHNLIPVNEALRIAASEENYEIVSLLLAWEGNLYYAIIGALEGNHHNLIRKYDDQIKDHHEILPFIDDPVIFHKCHTMRRCFFNCILYQAVKYSKFSVLLYFKYILKENLPLVHSLIEKAYKYHNYEVIKWIYENLHIYDIINTFKCAIAHKDLRLYCLGYTFVYNRIVPYKYYHLDIRILLRLQLLHKVTAKGYLDFILETLKYDHNTNNIDIILTQAATYNHRNILTYFIPQSTYAQIEQCLFVAIKTNASKKTLNLLLSHLNLSIKLVKKLSQYVVAYKSTNIISILSRQQKKKIYLDIILTKVVKNAVFNKFVIGCMVTFSINPERIVKMAARIKKMKLVKNISEHVWKNHAVKLKYLKHAVHTMKHQEGKNRLMNFIYDHCYYHMQEEEIFSLARFYAIHHAPKLFDVFYDCCILDTIRFKSLLLDCSHIIVKNAHDASINIVNKYIGNLFAMGVLSKKEILQDYPSIYSKDYML

SEQ ID NO: 202 - protein, 530 aa, African swine fever virus
MFSLQNLCRKTLPDCKLPEFFDDYVLQLLGLYWENHGTIQRAGNNCVLIQQHNLIPVNEALRIAASEENYEIVSLLLAWEGNLYYAIIGALEGNRHNLIRKYDDQIKDHHEILPFIDDPVIFHKCHIMRRCFFNCMLYQAVKYSKFSVLLYFKYILKENLPLVHSLIEKAYKYHNYEVIKWIYENLHIYDIINTFKYAIAHKDLRLYCLGYTFVYNRIVPYKYYHLDIRILLRLQLLHKVTAKGYLDFILETLKYDHNTNNIDIILTQAATYNHRNILTYFIPQSTYAQIEQCLFVAIKTNASKKTLNLLLSHLNLSIKLVKKLSQYVVAYKSTNIISILSMQQKKKIYLDIILTKVVKNAVFIKFVIGCMVTFSINPERIVKMAARIKKMKLVKNISEHVWKNHAAKLKHLKHAVHTMKHQEGKNRLMNFIYDHCYYHMQGEEIFSLARFYAIHHAPKLFDVFYDCCILDTIRFKSLLLDCSHIIAKNAHDASINIVNKYIGNLFAMGVLSKKEILQDYPSIYSKYDIL

SEQ ID NO: 203 - protein, 530 aa, African swine fever virus
MFSLQNLCRKTLPDCKLPEFFDEYILQLLGLYWENHGTIQRAGNNCVLIQQHNLIPVNEALRIAASEENYEIVSLLLAWEGNLYYAIIGALEGNRPDLIRKYDDQIKDHHEILPFIDDPIIFHKCHIMRRCFFNCILYQAVKYSKFRVLLYFKHRLGDDLPLTHLLIEKACEDHNYEVIKWIYENLHSYNIMDTFECAIAHKDLRLYCLGYTFIYNRIVPYKYHHLDICILSSLQLLHKVAAKGYLDFILETLKYDHNINNIDIILTQAATYNHRKILTYFIPQLTYAQIEQCLLVAIKTKASKKTLNLLLSHLNLSIKLIKKISQYVVTYNSTNIISILSMRRKKKIYLDIILTEFVKNAIFNKFVVRCMDTFSINPERIVKMAARINRMMLVKNISERVWKNHAVKLKHLKHAVHTMKHQEGKNRLMNFIYDHCYYHMQGEEIFGLARFYAIHHAPKLFDVFYDCCMLDATRFKSLLLDCPHIIGKNAYDAGINLVNKYIGNLFAMGVLSKKEILQDYPSIYSKHDMF

SEQ ID NO: 204 - DNA, 462 bp, African swine fever virus
atgtattttaagaaaaaatacatcggtcttattgataagaactgtgaaaaaaaaatattagatgattctagtacaataaaaatttgttacatattaattggaatattgattggaactaatatgataactcttatttataatttcatattctgggataattatataaaatgttaccgaaataatgataaaatgttttactgtcctaatgattgggttggatataataatatttgttactattttagtaatggtagtttttctaaaaattatacagctgctagtaatttttgtagacaattaaatggtacacttgctaataatgatactaatttattaaatctaactaaaatatataataatcaatctatgtattgggttaacaatacggtaatattacgtggtgataataaatatagtcaaaaagttaactatacagatttattatttatttgtggtaaataa

SEQ ID NO: 205 - DNA, 477 bp, African swine fever virus
atgttttctaacaaaaagtacatcggtcttatcaataagaaggagggtttgaaaaaaaaaatagatgattatagtatattaataattggaatattaattggaactaacatcttaagccttattataaatataataggagagattaataaaccaatatgttaccaaaatgatgataagatattttattgccctaaagattgggttggatataataatgtttgttattattttggcaatgaagaaaaaaattataataatgcaagtaattattgtaagcaattaaatagtacgcttactaataataatactattttagtaaatcttactaaaacattaaatcttactaaaacatataatcacgaatctaattattgggttaattattctttaattaaaaatgagtcagtactattacgtgatagtggatattacaaaaaacaaaaacatgtaagtttattatatatttgtagtaaataa

SEQ ID NO: 206 - DNA, 495 bp, African swine fever virus
atgtattctaagaaaaagtacatcggtcttattgacaagaactgtgaaaaaaaaatattagatgatgctactacaataaaaatttgttacatattaattggaatattgattggaactaatattataactcttatctataatttcatattttgggagaattatataaaatgtatccaaaatgatgataagatgttttactgtcctaaagattgggttgggtataataatgcgtgttattattttagtaataacaataaaaattatacagatgcaaataattattgtaaaaattcacataatagtacacttgctaataatgatactaaattattaaatcttactaaattattaaatctttctaaattatattacaatgattctacatattgggttaaatattctttacctaaaaataaagcagtaacattacgtaacagtacctacaaatatgatagagttaaatctacagaaacattttttatttgtagtaactaa

SEQ ID NO: 207 - DNA, 498 bp, African swine fever virus
atgtattctaagaaaaagtacatcggtcttattgacaaaagctgtgaaaaaaaaatattagatgatcctactacaataaaaatttgttacatattaattggaatattgattggaactaatattataactcttatctataatttcatattttgggagaattatataaaatgtatccgaaatgatgataagatgttttactgccctaaagattgggttggatataataatgtgtgttattattttagtaacgataatggaaaaaattatatgaatgcaagtaatttttgtaataaaaaaaatagcacgcttgctaataatacgactaatttagtaaatcttactaaaatattaaattttaccaaacaatataatcatgaatcactttattgggttaattattctttaagtaataatatgtcattagcattacagaatagtaattttccttcttcaggaagacgtaaatatatggacttattatatatatgtagtatataa

SEQ ID NO: 208 - DNA, 462 bp, African swine fever virus; identical to SEQ ID NO: 204

SEQ ID NO: 209 - DNA, 477 bp, African swine fever virus; identical to SEQ ID NO: 205

SEQ ID NO: 210 - DNA, 486 bp, African swine fever virus
atgttttctaacaaaaagtacatcggtcttattgacaagtactgtgaaaaaaaaatattagatgattctagtacaataaaaatttgttacatattaattggaatactgattggaactaatatgataactcttatttataatttcatattttgggagaattatataacatgtaaccaaaaagataagacgttttactgtcctaaagattgggttggatataataatgtttgttattattttggcaatgatgaaaaaaattataataatgcaagtaattattgtaagcaattaaatagtacgcttactaataataatactaatttagtaaatcttactaaaacattaaatcttactaaaacatataatcacgaatctaattattgggttaattattctttaattaaaaatgagtcagtactattacgcaatagtggatattataaaaaacaaaaacatgtaagtttattatatatttgtagtaaataa

SEQ ID NO: 211 - DNA, 492 bp, African swine fever virus
atgttttctaataaaaagtacattggtcttatcaataagaaggagggattgaaaaaaaaaatagatgattatagtatattaataattggaatattaattggaactaacatcttaagccttattataaatataataggagagattaataaaccaatatgttaccaaaataatgataagatattttattgccctaaagattgggttggatataataatgtttgttattattttagtaatgataatggcaataattatacaactgcggataataaatgtaaacaattaaataatagtacactggctaataatcttactgatttattaaatcttacgagtttcttaaatcttactaaattatatcatcatcattctcattattgggttaattattctttaaataataattattcagtaccattaattgatagtaaatataatttaaataggaaaaaaagtcactatacagatttactatttatttgcagcaaataa

SEQ ID NO: 212 - DNA, 465 bp, African swine fever virus
atgtattttaagaaaaaatacatcggtcttattgataagaactgtgaaaaaaaaatattagatgattctagtacaataaaaatttgttacatattaattggaatattgattggaactaatatgataactcttatttataatttcatattctgggataattatataaaatgttaccgaaataatgataaaatgttttactgtcctaatgattgggttggatataataatgtttgttactattttagtaatggtagtttttttaaaaattatacagatgctaataattattgtaaaaaaataaatagtactcttgctaataatgatactaatttattaagtttaactaaaatatacaataatcaatctatgtattgggttaacaatacagtagcattacgtggtgatagtgtatatgcacaaagaaaagttaataattcagatctattatttatttgtagtaaataa

SEQ ID NO: 213 - DNA, 465 bp, African swine fever virus
atgtattttaagaaaaagtacatcggtcttattgataagaactgtgaaaaaaaaatattagatgattgtactacaataaaaatttgttacatattaattggaatattgattggaactaatatgataactcttatttataatttcatattttgggatcattatatgacatgtaacaaaaaagataagatgttttactgtcctaaagattgggttggatataataatgtttgttattattttagtaatgatagttttactaagaattatacatatgcaagtaattcttgtaaaaaaataaatagtacacttgctaataatgatactaatttactaaatcttattaaagtatataataatgtatctgagtattgggttaataatacagtaacattacgtggtgatcataaatacataaataagcaaaataattgtaatacagaatttttatttatttgtagtagatag

SEQ ID NO: 214 - DNA, 471 bp, African swine fever virus
atgttttctaacaaaaagtatccgagtcttatcgaaaaaaaaatggatgacttgatgactttaaagttttgttacatcattattgcaatcttgatcatgactaatatttttagccttgttgtgaatatatggggggggggtgatcgacaatcttatgagaatgtattttattgtcctaaagattgggttggatataataatgcatgttattattttagtaatgatatgaaaaattatacagaagcaagtaattattgtaaaaatttatataatagtacaattgttaataataatactaatatagtaaatcttactaaaacattaaatcttactaaaatatataatcatgaaagtaattattgggttaattattctttaattaataatgagtcattaacattacgggacagtaattttccttcttcaggaaaacgtacatatatagatttattatatatatgtagtatataa

SEQ ID NO: 215 - DNA, 468 bp, African swine fever virus
atgtattttaagaaaaagtacatcggtcttattgataagaactgtgaaaaaaaaatattagatgattgtactacaataaaaatttgttacatattaattggaatattgattggaactaatatgataactcttatttataatttcatattttgggatcattatatgacatgtaacaaaaaagataagatgttttactgtcctaaagattgggttggatataataatgtttgttattattttaataatgatagtaagaattatacaactgctactaattcttgtaaacaattaaatagtacacttgctaataatgatactaatttattaaatcttactaaagtatatcaccatgataaattatattgggttaactattctttaaatgacaatttttcattatcattacgtaatagtacatatgaaaaaagatctaaatatttgccattattatttatttgcagtaaataa

SEQ ID NO: 216 - DNA, 477 bp, African swine fever virus
atgtttttgaacaaaaagtatccgagtcttatcgaaaaaaaaatggatgatttgatgactttaaagttttgttacttaataatcacatttttaatcataaccaatatttttagccttgctataaatatatggggggggggtgatatgatagatcgacaaagttgtgaaaatatattttactgtcctaaagattgggttggctataataatgcgtgttattattttagtaataacaataaaaattatacagatgcaaataattattgtaaaaattcacataatagtacacttgctaataatgatactaaattattaaatcttactaaattattaaatctttctaaattatattacaatgattctacatattgggttaaatattctttacctaaaaataaagcagtaacattacgtaacagtacctacaaatatgatagagttaaatatacagaaacattttttatttgtagtaactaa

SEQ ID NO: 217 - protein, 158 aa, African swine fever virus
MFSNKKYIGLINKKEGLKKKIDDYSILIIGILIGTNILSLIINIIGEINKPICYQNDDKIFYCPKDWVGYNNVCYYFGNEEKNYNNASNYCKQLNSTLTNNNTILVNLTKTLNLTKTYNHESNYWVNYSLIKNESVLLRDSGYYKKQKHVSLLYICSK

SEQ ID NO: 218 - protein, 164 aa, African swine fever virus
MYSKKKYIGLIDKNCEKKILDDATTIKICYILIGILIGTNIITLIYNFIFWENYIKCIQNDDKMFYCPKDWVGYNNACYYFSNNNKNYTDANNYCKNSHNSTLANNDTKLLNLTKLLNLSKLYYNDSTYWVKYSLPKNKAVTLRNSTYKYDRVKSTETFFICSN

SEQ ID NO: 219 - protein, 165 aa, African swine fever virus
MYSKKKYIGLIDKSCEKKILDDPTTIKICYILIGILIGTNIITLIYNFIFWENYIKCIRNDDKMFYCPKDWVGYNNVCYYFSNDNGKNYMNASNFCNKKNSTLANNTTNLVNLTKILNFTKQYNHESLYWVNYSLSNNMSLALQNSNFPSSGRRKYMDLLYICSI

SEQ ID NO: 220 - protein, 153 aa, African swine fever virus; identical to SEQ ID NO: 20

SEQ ID NO: 221 - protein, 158 aa, African swine fever virus; identical to SEQ ID NO: 217

SEQ ID NO: 222 - protein, 161 aa, African swine fever virus
MFSNKKYIGLIDKYCEKKILDDSSTIKICYILIGILIGTNMITLIYNFIFWENYITCNQKDKTFYCPKDWVGYNNVCYYFGNDEKNYNNASNYCKQLNSTLTNNNTNLVNLTKTLNLTKTYNHESNYWVNYSLIKNESVLLRNSGYYKKQKHVSLLYICSK

SEQ ID NO: 223 - protein, 163 aa, African swine fever virus
MFSNKKYIGLINKKEGLKKKIDDYSILIIGILIGTNILSLIINIIGEINKPICYQNNDKIFYCPKDWVGYNNVCYYFSNDNGNNYTTADNKCKQLNNSTLANNLTDLLNLTSFLNLTKLYHHHSHYWVNYSLNNNYSVPLIDSKYNLNRKKSHYTDLLFICSK

SEQ ID NO: 224 - protein, 154 aa, African swine fever virus
MYFKKKYIGLIDKNCEKKILDDSSTIKICYILIGILIGTNMITLIYNFIFWDNYIKCYRNNDKMFYCPNDWVGYNNVCYYFSNGSFFKNYTDANNYCKKINSTLANNDTNLLSLTKIYNNQSMYWVNNTVALRGDSVYAQRKVNNSDLLFICSK

SEQ ID NO: 225 - protein, 154 aa, African swine fever virus
MYFKKKYIGLIDKNCEKKILDDCTTIKICYILIGILIGTNMITLIYNFIFWDHYMTCNKKDKMFYCPKDWVGYNNVCYYFSNDSFTKNYTYASNSCKKINSTLANNDTNLLNLIKVYNNVSEYWVNNTVTLRGDHKYINKQNNCNTEFLFICSR

SEQ ID NO: 226 - protein, 156 aa, African swine fever virus
MFSNKKYPSLIEKKMDDLMTLKFCYIIIAILIMTNIFSLVVNIWGGGDRQSYENVFYCPKDWVGYNNACYYFSNDMKNYTEASNYCKNLYNSTIVNNNTNIVNLTKTLNLTKIYNHESNYWVNYSLINNESLTLRDSNFPSSGKRTYIDLLYICSI

SEQ ID NO: 227 - protein, 155 aa, African swine fever virus
MYFKKKYIGLIDKNCEKKILDDCTTIKICYILIGILIGTNMITLIYNFIFWDHYMTCNKKDKMFYCPKDWVGYNNVCYYFNNDSKNYTTATNSCKQLNSTLANNDTNLLNLTKVYHHDKLYWVNYSLNDNFSLSLRNSTYEKRSKYLPLLFICSK

SEQ ID NO: 228 - protein, 158 aa, African swine fever virus
MFLNKKYPSLIEKKMDDLMTLKFCYLIITFLIITNIFSLAINIWGGGDMIDRQSCENIFYCPKDWVGYNNACYYFSNNNKNYTDANNYCKNSHNSTLANNDTKLLNLTKLLNLSKLYYNDSTYWVKYSLPKNKAVTLRNSTYKYDRVKYTETFFICSN

SEQ ID NO: 229 - DNA, 1083 bp, African swine fever virus
atgataatacttatttttttaatattttctaacatagttttaagtattgattattgggttagttttaataaaacaataattttagatagtaatattactaatgataataatgatataaatggagtatcatggaatttttttaataattcttttaatacactagctacatgtggaaaagcaggtaacttttgtgaatgttctaattatagtacatcaatatataatataacaaataattgtagcttaactatttttcctcataatgatgtatttgatacaacatatcaagtagtatggaatcaaataattaattatacaataaaattattaacacctgctactcccccaaatatcacatataattgtactaattttttaataacatgtaaaaaaaataatggaacaaacactaatatatatttaaatataaatgatacttttgttaaatatactaatgaaagtatacttgaatataactggaataatagtaacattaacaattttacagctacatgtataattaataatacaattagtacatctaatgaaacaacacttataaattgtacttatttaacattgtcatctaactatttttatactttttttaaattatattatattccattaagcatcataattgggataacaataagtattcttcttatatccatcataacttttttatctttacgaaaaagaaaaaaacatgttgaagaaatagaaagtccaccacctgaatctaatgaagaagaacaatgtcagcatgatgacaccacttccatacatgaaccatctcccagagaaccattacttcctaagccttacagtcgttatcagtataatacacctatttactacatgcgtccctcaacacaaccactcaacccatttcccttacctaaaccgtgtcctccacccaaaccatgtccgccacccaaaccatgtcctccacctaaaccatgtccttcagctgaatcctattctccacccaaaccactacctagtatcccgctactacccaatatcccgccattatctacccaaaatatttcgcttattcacgtagatagaattatttaa

SEQ ID NO: 230 - DNA, 1083 bp, African swine fever virus; identical to SEQ ID NO: 229

SEQ ID NO: 231 - DNA, 1170 bp, African swine fever virus
atgataataatccttatttttttaatatatttaaaactggtcttaaataataatattattatatggcatcctactttaaatgaaacaatttttttaaatgttacaactatagggaatattagtggtctattttggaatacatattataataataatcgtagtgaacttactaagtgcggaatatataataattattgttcatgtgatagtcttaatacatcattgtataatataaataattgtagtttagttatttttccaaataatacaaaaatatttaatacaatatatgaattaatatattcaggtaatcaaactaattatacaataaaattgctagaatctactactcctccaaatattacatataattgtactacatctgtaataacatgtaaaaaaaataatgggacaaatactaatatatttttaactataaataatacgattgttaattctactaatgaagatgttatttactactattggaatagaagtgaatttaataactttacagctacatgtatgattaataatacaattaattcatcaaatatatcagaaattatagactgtactaatacattattattaaacagttatttagacttttttcaagtagccggttatatgttttatatgataatttttattgtaactggaataacagtaagtatttttatttcaatcataacttttttatctttacgaaaaagaaaaaaacatgttgaagaaatagaaagtctaccacctgaatctaatgaagaagaatgtcagcatgatgatgacaccacttccatacatgaaccatcccccagagaaccattacttcctaaaccttacagtcgttatcagtataatacacctatttactacatgcgtccctcaacacaaccactcaacccatttcccctacctaaaccatgcccaccacctaaaccgtgtccgccacccaaaccatgtcctccacccaaaccatgcccgccacccaaaccatgcccgccacctaaaccatgtcctccacctgaatcatgttcttcacctgaatcatgttcttcacctgaatcatattctccacccaaaccactacctagtatcccgctgctacccaatatcccgccattatctacacaaaatatttcgcttattcatgtagatagaattatttaa

SEQ ID NO: 232 - DNA, 1221 bp, African swine fever virus
atgataatgttcataacacttatttttttaagttatattaatatagttttaagtaataattattgggctagacttaacgaaacaataactttaaatagtaacattactaatgatactaataatgaattaggtatattttggaattcttataataatacttattataataatacatttaataatattgctatatgtggaaaaaaaggtattttttgtgaatgtaatattaattataatacatctatatctaatacatctatatctaatacatcaatatataatgtaacaaataattgtagtttaacgatttttctttatgatgataatatatttaaaacatatcaattagtatatcagaattacaaaattaattatacaataaacttattattacctgttacttctccaaatattacatataattgtactaactctttaataacatgtgaaaaaaatgatgggacaaacactaatatgtttttatctataaataatataaccattaatcatactaatcaagatattcttacttactattggaataatagtgagtttaataattttacagctacatgtatgattaataatacacttaattcagcaaataccacaaaagttatcaattgcactaatccattattaaattcttaccaaaattattttcttgaaaatattcatacattattttatatcataatttttattgtgagtggattaatagcaagtatttttatttcaattataacttttttatctttacgaaaaagaaaaaaacatgttgaagaaatagaaagtccaccacctgaatctaatgaagaagaacaatgtcagcatgatgacaccacttccatacatgaaccatctcccagagaaccattacttcctaaaccttacagtcgttatcaatataatacacctatttactacatgcgtccctcaacacaaccactcaacccatttcccctacctaacccatgtcctccacctaaaccgtgtcctccacccaaaccatgcccgccacctaaaccatgtcccccacccaaaccatgcccgccacctaaaccgtgtcctccacccaaaccatgtccaccacctaaaccatgttcttcacctgaatcatattctccacccaaaccactacctagtatcccgctactacccaatatcccaccattatctacacaaaatatttcacttattcatgtagatagaattatttaa

SEQ ID NO: 233 - DNA, 1122 bp, African swine fever virus
atgataataatagttatttttttaatgtgtttaaaaatagttttaaacaatattataatatggagtactttaaatcaaactgtatttttaaataatatttttacaattaatgatacatatggtggtctattttggaatacatattatgataataatcgtagtaattttacttattgtggaatagcaggaaattattgttcatgttgtggtcataacatatcattgtataatacaacaaataattgtagtttaattatttttcctaacaatacagaaatatttaatagaacatatgaattagtatatttggacaaaaaaattaattatacagtaaaactattaaaatctgttgattccccaactattacatataattgtactaattctttaataacatgtaaaaataataatgggacaaatgttaatatatatttaattattaataatacaattagttcattgaatgaaacagaaaatataaattgtactaatccaatattaaaatatcaaaattatttatccacattattttatatcataatttttattgtgagtggattaataataggtatttttatttcaatcatatctgtattatctatacgaagaaaaagaaaaaaacatgttgaagaaatagaaagtccaccaccctctgaatctaatgaagaagatatttctcacgatgacaccacttccatacatgaaccatctcccagagaaccattacttcctaagccttacagtcgttatcagtataatacacctatttactacatgcgtccctcaacacaaccactcaacccatttcccctacctaaaccatgcccgccacctaaaccatgtcctccacccaagccatgcccgccacccaaaccatgtcctccacctaaaccgtgttctccacccaaaccgtgtcgtccacctaaaccatgtcctccacctaaaccatgtcctccacctaaaccatgtcctccacctaaaccatgtcctccatccaaaccatgtccttcacctgaatcctattctccacccaaaccactacctagtatcccgttactacccaatatcccgccattatctacacaaaatatttcgcttattcatgtagatagaattatttaa

SEQ ID NO: 234 - DNA, 1209 bp, African swine fever virus
atgataataatagttatttttttaatgtgtttaaaaatagttttaaacaatattataatatggagtactttaaatcaaactgtatttttaaataatatttttacaattaatgatacatatggtggtctattttggaatacatattatgataataatcgtagtaattttacttattgtggaatagcaggaaattattgttcatgttgtggtcataacatatcattgtataatacaacaaataattgtagtttaattatttttcctaacaatacagaaatatttaatagaacatatgaattagtatatttggacaaaaaaattaattatacagtaaaactattaaaatctgttgattccccaactattacatataattgtactaattctttaataacatgtaaaaataataatgggacaaatgttaatatatatttaattattaacaatacaattgttaatgatactaatggagatatccttaattattattggaatggtaataataattttacagctacatgtatgattaataatacaattagttcattgaatgaaacagaaaatataaattgtactaatccaatattaaaatatcaaaattatttatccacattattttatatcataatttttattgtgagtggattaataataggtatttttatttcaatcatatctgtattatctatacgaagaaaaagaaaaaaacatgttgaagaaatagaaagtccaccaccctctgaatctaatgaagaagatatttctcacgatgacaccacttccatacatgaaccatctcccagagaaccattacttcctaagccttacagtcgttatcagtataatacacctatttactacatgcgtccctcaacacaaccactcaacccatttcccctacctaaaccatgcccgccacctaaaccatgtcctccacccaagccatgcccgccacccaaaccatgtcctccacctaaaccgtgttctccacccaaaccgtgtcgtccacctaaaccatgtcctccacctaaaccatgtcctccacctaaaccatgtcctccacctaaaccatgtcctccatccaaaccatgtccttcacctgaatcctattctccacccaaaccactacctagtatcccgttactacccaatatcccgccattatctacacaaaatatttcgcttattcatgtagatagaattatttaa

SEQ ID NO: 235 - DNA, 1149 bp, African swine fever virus
atgataataaaggttatttttttagttttctttaaaatggttttaagtaatattataatatggagtactttaaataacacaatatatttaaatattaattattcagatagtaatttatatactggtctattttggaataaatattataataatactcgtaataattttactacttgtgtaacatcaaatagtagctattgtacatgtaaaggccataacacatcattgtataatataacaaataattgtagtttaatcatttttccaaataatacaaaaatatttaatacaacatatgaattagtatatttaaataataaaattaattatacaatacaaatggtacaacctgttgatcctccaattattatatataatgatactaataattctttaataacatgtgaaaaaaataatggaacgaatactgaaatctatttatatttaaatgatacatttattaataatactaatgaaaatagtattaaatactattggaattgtagcgaattaaaccataatattacaactacatgtattattaataatacacttaattcggcaaataccacaaaagttataaattgcactaatctattgttaaaatctgaccaaaattattttcttaaaaatattcatacattattttatatcataatttttattgtgggtggaacattaataagcattattatatcaatcataacttttttatctttacgaaaaagaaaaaaacatgttgaagaaatagaaagtccaccaccctctgaatctaatgaagaagaacattgtcagcatgatgataccacttccatacatgaaccatctcccagagaaccattacttcctaagccttacagtcgttatcagtataatacacctatttactacatgcgtccctcaacacaaccactcaacccatttcccctacctaaaccatgtcctccacctaaaccgtgtcctccacccaaaccatgtcctccacctaaaccgtgtcctccacctaaaccgtgtcccccacctaaaccatgtccttcacctgaatcccattctccacccaaaccactacctagtatcccgctgctacccaatattcccccattatctacacaaaatatttcgcttattcatgtagatagaattatttaa

SEQ ID NO: 236 - DNA, 1128 bp, African swine fever virus
atgataataatacttatttttttaataattcctaacatagttttaagtattgattattgggttagttttaataaaacaataattttagatagtaatattactaatgataataatgatataaatggagtatcatggaatttccttaataattctcttaatacactagctacatgtggaaaagcaggtaacttttgtgaatgctctaattatagtacatcactatataatatagcacataattgtagcttaactattttccctcataatgatgtatttggtacaccatatcaagtagtatggaatcaaataattaattatacaataaaattattaacacctgttactcccccaaatattacatataattgtactaattttttaataacatgtaaaaaaaataatggaacaaatactattatatatttcaatataaatgatactaatgttaaatatactaatgaaagtatacttgaatataactggaataatagtaactttaacaattttacagctacatgtataattaataatacaattaattcatcaaatgatacacaaactatagactgcatcaatacattattaagcagttatttagacttttttcaagtagccagttatatgttttatatgataatttttattgcaactggaataatagcaagtatttttatatcaatcataacttttttatctttacgaaaaagaaaaaaacatgttgaagaaatagaaagtccatcgccatctgaatctaatgaagaagaacaatgtcagcatgatgacaccacttccatacatgaaccgtctcccagagaaccattacttcctaagccttacagtcgatatcagtataatacacctatttactatatgcgtcccttaacacaaccactcaatccatctcccctacccaaactgtgtcctccacccaaaccgtgtcctccacccaaaccgtgtcctccacccaaaccgtgtcctccacccaaaccgtgtccttcatctgaatcatgttctccacctgaatcatattctctacccaaaccactacctaatatcccgctactacccaatatcccgccattatctacacaaaatatctcgcttattcacgtagatagaattatttaa

SEQ ID NO: 237 - DNA, 1158 bp, African swine fever virus
atgataataaagcttatttttttaatatcatttaaaatgattttaggtattgattattgggttagtcttaataatacaataattttagatagtaacattactattaataatattactaatactactaataatcctacattaaatggtatattttggaatatttataataatagttataataatacttttaatttacttaccacatgtgggaatacatataatatatgttcttgttctaataattataatacaatattatttaattataataccacaaataattgtagtttaattatttctcctcatgatgaaaaaatttttgatacgatgtttcagataatatatttaactaataaaattaattatacaatacgatggttacaacctgttgatcccccaaatatttcatttaatgatagtaattctttaataaaatgtgaaaaaaataatggaacaaatactgaaatctatttatatttaaatgatacatttattaataatactaatgaaaatgatcttaaatattattggaattgtagtgagttaaactataatattacagctacatgtattattaataatacacttaattcggcaaataccacaaaagttataaattgcactaatctattattaaaatctgaccaaaattattttcttaaaaacattcatacattattttatatcataatttttattgtaactgggataataataagtatttttatagcaatcataacttttttatctttacgaaaaagaaaaaaacatgttgaagaaatagaaagtccatcgcctgaatctaatgaagaggaagaacaacaacatcatcatgacactacttccatacatgaaccgtctcccagagaaccattacttcctaagccttacagtcgttatcagtataatacacctatttattacatgcgtccctcaacacaacaactatttaaatcatattctttacccaaaccatgtcccccacctaaaccatgtcctccacctaaaccatgtcccccacccaaaccatgtccctcaccagaatcatatccctcacctgaaccatatcctctactacctaatatcccactaccacccaatatcccgccattatctacacaaaatatttcgcttattcacgtagatagaattatttaa

SEQ ID NO: 238 - DNA, 1143 bp, African swine fever virus
atgataataaaacttatttttttaatttgttttaaaatagttttaagtattgataataaaacaaaatttaatgaaacattaattttagataatattgattattgggtaaagtttaatgatacaataactttagatagtaatattactagtgaaatagaagctgtatcttggaatttttataataatacttttaatctacttgctacatgtggaaaagcaagtaacttttgtagttgttctaattatagtacatcattttttaatattacaaataattgtagtttaactatttttttaatagacgagacgttatttaatacaacatatcaaatagtatattcaactaatataattaattataaaataaacttattaatacctgttactcctccaattatttcatataattgtactaattgttctataaattgtaaaaaaagtaatggtacaaatactaatatttttttatctataaatgatacaattgttacatatactaatgaaagtattcttaattatgattataactgtagtattttaaataataattttacagttacatgtataattaataatacaattagtacatcaaatactacagaatttataaactgcactaatatattattaagtagttatctagatttttttcaagtaactagttatatattttatatgataatttttattgtaactggaataacagtaagtattcttatatccatcataactttcttatttatacgaaaaagaaaacatgttgaagaaatagaaagtccaccgcctgaatctaatgaagaagaacaacaatgtcatcatgacaccacttctatacatgaaccgtctcccagagaaccattacttcctaagccttacagtcgttatcaatataatacacctatttactacatgcgtccctcaacacaacaactatttaaatcatattctttacccaaaccatgtcccccacctaaaccatgtcctccacccaaaccatgtcccccacccaaaccatgtcctccacccaaaccatgtcctccatccaaaccatatccttcactacctagtatcccgctaccacccgatatcccgccattatctacacaaaatatttcgcttattcacgtagatagaattatttaa

SEQ ID NO: 239 - DNA, 1179 bp, African swine fever virus
atgataataaaacttatttttttaatttgttttaaaatagttttaagtattgataataaaacaaaatttaatgaaacattaattttagataatattgattattgggtaaagtttaatgatacaataactttagatagtaatattactagtgaaatagaagctgtatcttggaatttttataataatacttttaatctacttgctatatgtggaaaagcaagtaacttttgtagttgttctaattatagtacatcattttttaatattacaaataattgtagtttaactatttttttaatagacgagacgttatttaatacaacatatcaaatagtatattcaactaatataattaattataaaataaacttattaatacctgttactcctccaattatttcatataattgtgctaattgttctataaattgtaaaaaaagtaatggtacaaatactaatatttttttatctataaatgatacaattgttacatatactaatgaaagtattcttaattatgattataactgtagtattttaaataataattttacagttacatgtataattaataatacaattagcacatcaaatactacagaatttataaactgcactaatatattattaagtagttatctagatttttttcaagtaactagttatatattttatatgataatttttattgtaactggaataacagtaagtattcttatatccatcataactttcttatttatacgaaaaagaaaacatgttgaagaaatagaaagtccaccgcctgaatctaatgaagaagaacaacaatgtcatcatgacaccacttctatacatgaaccgtctcccagagaaccattacttcctaagccttacagtcgttatcaatataatacacctatttactacatgcgtccctcaacacaacaactatttaaatcatattctttacccaaaccatgtcccccacctaaaccatgtcctccacctaaaccatgtcccccacctaaaccatgtcctccatccaaaccatgtcctccacctgaaccatattctccacccaaaccatgtcctccacccaaaccatatccttcactacctagtatcccgctaccacccgatatcccgccattatctacacaaaatatttcgcttattcacgtagatagaattatttaa

SEQ ID NO: 240 - DNA, 1146 bp, African swine fever virus
atgataattaaacttatttttttaatttgtttcaaaatagttttaagtattaattattgggttaggtataatgatacagtaactttaaatagtaatatcaatagcgagacagaaggtatattttggaatttttataataatacttttaatactattgccacatgtggaaaaaaaaataatgtttgtgaatgttctaattatgataaatccttatataatataacaaataattgtagtttaacaatttttccaaataatacaaaaatatttaatacaacatatcaattagtatattcacgcaatagaattaattacacaataaatttgttattacctgttacatctccaattattacatataattgtactcaatctttaataacatgtgaaaaaactaatggaacaaatattcatttattcttaaatttaaatgatacaattaatgaatatactaacaaaagttttctcaattactattggaatagtagtgagttaaataatatttttcttgctacatgtattattaataatacacttaattcagcaaatactacaaaagttatcaattgcactaacccattattaaaatcttaccaaaattattttcttgaaaatattcatacattattttatatgataatttttattgtatctggaataacaataagtatttttatatcaatcataacttttttatctttacgaaaaagaaaaaaacatgttgaagaaatagagagtccaccacctgaatctaatgaagaagaacaatgtcagcatgatgacaccacttctatacatgaaccatctcccagagaaccattacttcctaaaccttacagtcgttatcagtataatacacctatttactacatgcgtccctcaacacaaccactcaacccatttcccctacctaaaccatgcccgccacctaaaccgtgtcctccacccaaaccatgcccgccacccaaaccatgcccgccacctaaaccatgtcctccacccaaaccatgcccgccacctaaaccatgtcctccacctgaatcatattctccacccaaaccactacctagtatcccgctgctacccaatatcccgccattatctacacaaaatatttcgcttattcatgtagatagaattatttaa

SEQ ID NO: 241 - DNA, 1182 bp, African swine fever virus
atgatgataattatacttatttttttaatatgtttaaaaatagttttaaataataatattataatatggcatactttaaatgaaacaatttttttaaataatagtattacatttacggataatcttggtggtctattttggaatacatattataataataatcatagtatccttactagttgcggaatatatcaaaattattgttcatgcactaataattatagcacatcattatataatataacaaataattgtggtttaataatttttccaaataatacaaaaagatttaacacaacgtatgaattagtatatttaaataatagtactaaatatacaataaacttattagtacctgttactcctccaaatattacatataattgtactacatctgtaataacatgtaaaaaaaatgatggcacaaatactaatatgtttttaaaaataaatgatacaatcgttaaaagtagtaatgaaagtgtttttgaatactcttggaatagtactgatttaaataacaattttacggctatatgtataattaataatacaattaattcatcaaatgacacacaaactatagaatgtcccaatatattattaaacaattatttagacttttttcaagtaactagttacatgttttatatgataatttttattgtaactggaataatagcaagtatttttatttcaatcataacttttttatctttacgaaaaagaaaaaaacatgttgaagaaatagaaagtccaccaccctctgaatctaatgaagaagatatttctcacgatgacaccacttccatacatgaaccatctcccagagaaccattacttcctaagccttacagtcgttatcagtataatacacctatttactacatgcgtccctcaacacaaccactcaacccatttcccctacctaaaccatgcccgccacctaaaccatgcccgccacccaaaccatgtcctccacctaaaccgtgtcctccacccaaaccgtgtcgtccacctaaaccatgtcctccacctaaaccatgcccaccacctaaaccatgtccttcacctgaaacatattctccacccaaaccactacctaatatcccgctgctacccaatatcccgccattatctacacaaaatatttcgcttattcacgtagataggattatttaa

SEQ ID NO: 242 - protein, 360 aa, African swine fever virus; identical to SEQ ID NO: 24

SEQ ID NO: 243 - protein, 406 aa, African swine fever virus
MIMFITLIFLSYINIVLSNNYWARLNETITLNSNITNDTNNELGIFWNSYNNTYYNNTFNNIAICGKKGIFCECNINYNTSISNTSISNTSIYNVTNNCSLTIFLYDDNIFKTYQLVYQNYKINYTINLLLPVTSPNITYNCTNSLITCEKNDGTNTNMFLSINNITINHTNQDILTYYWNNSEFNNFTATCMINNTLNSANTTKVINCTNPLLNSYQNYFLENIHTLFYIIIFIVSGLIASIFISIITFLSLRKRKKHVEEIESPPPESNEEEQCQHDDTTSIHEPSPREPLLPKPYSRYQYNTPIYYMRPSTQPLNPFPLPNPCPPPKPCPPPKPCPPPKPCPPPKPCPPPKPCPPPKPCPPPKPCSSPESYSPPKPLPSIPLLPNIPPLSTQNISLIHVDRII

SEQ ID NO: 244 - protein, 373 aa, African swine fever virus
MIIIVIFLMCLKIVLNNIIIWSTLNQTVFLNNIFTINDTYGGLFWNTYYDNNRSNFTYCGIAGNYCSCCGHNISLYNTTNNCSLIIFPNNTEIFNRTYELVYLDKKINYTVKLLKSVDSPTITYNCTNSLITCKNNNGTNVNIYLIINNTISSLNETENINCTNPILKYQNYLSTLFYIIIFIVSGLIIGIFISIISVLSIRRKRKKHVEEIESPPPSESNEEDISHDDTTSIHEPSPREPLLPKPYSRYQYNTPIYYMRPSTQPLNPFPLPKPCPPPKPCPPPKPCPPPKPCPPPKPCSPPKPCRPPKPCPPPKPCPPPKPCPPPKPCPPSKPCPSPESYSPPKPLPSIPLLPNIPPLSTQNISLIHVDRII

SEQ ID NO: 245 - protein, 385 aa, African swine fever virus; identical to SEQ ID NO: 27

SEQ ID NO: 246 - protein, 380 aa, African swine fever virus
MIIKLIFLICFKIVLSIDNKTKFNETLILDNIDYWVKFNDTITLDSNITSEIEAVSWNFYNNTFNLLATCGKASNFCSCSNYSTSFFNITNNCSLTIFLIDETLFNTTYQIVYSTNIINYKINLLIPVTPPIISYNCTNCSINCKKSNGTNTNIFLSINDTIVTYTNESILNYDYNCSILNNNFTVTCIINNTISTSNTTEFINCTNILLSSYLDFFQVTSYIFYMIIFIVTGITVSILISIITFLFIRKRKHVEEIESPPPESNEEEQQCHHDTTSIHEPSPREPLLPKPYSRYQYNTPIYYMRPSTQQLFKSYSLPKPCPPPKPCPPPKPCPPPKPCPPPKPCPPSKPYPSLPSIPLPPDIPPLSTQNISLIHVDRII

SEQ ID NO: 247 - DNA, 414 bp, African swine fever virus
atgctggtgattatcctgggaattattggcctgctggccagtagcaacctggtttcatcctccacttctactcgggtaggtggacatcttcctctaacatttgaacccccagagaatgaacttggatactggtgcacttatgtggaaagctgtcggttctgctgggattgtgaagatgggatttgtaccagcagggtttggggaaacaactccacaagtattattgagaatgactatgtaaaatattgtgaggtttcccgctggggtgacctatgtagatatgatgtggaggagcacatttaccatagcatgaactgttctgacccaaagccctggaatccttataaaattgcaaggaaggagtggaaaaagaatgaacatcccagaaaggatttgaaaaaagatgaattctag

SEQ ID NO: 248 - DNA, 414 bp, African swine fever virus; identical to SEQ ID NO: 247

SEQ ID NO: 249 - DNA, 414 bp, African swine fever virus
atgctggtgattatcctgggagttattggcctgctggccagtagcaacttggtttcatcctccacttctactcggataggtggacatcttcctctaacatttgatcctccagagaatgaacttggatactggtgcacttatgtggaaagctgtcggttctgctgggattgtgaagatggggtctgtactagcaggatctgggggaacaactccacaagtattgttgagaacagctatgtaaaatattgtgaagtttcccgctggggtgaccagtgtagatatgatgtggaggagcgcatttaccataccatgaactgttctgacccaaaaccctggaatccttataaaattacaagggtggagtggaaaaagaatgaacatttcagaaaggatttgaaaaaagatgaattctag

SEQ ID NO: 250 - DNA, 414 bp, African swine fever virus
atgctggtgattatcctgggagttattggcctgctggccagtagcaacttggtttcatcctccacttctactcgggtaggtggacatcttcctctaacatttgatcctccagagaatgaacttggatactggtgcacttatgtggaaagctgtcggttctgctgggattgtgaagatggggtctgtactagcaggatctgggggaacaactccacaagtattgttgagaacagctatataaaatattgtgaagtttcccgctggggtgaccagtgtagatatgatgtggaggagcacatttactataccatgaactgttctgacccaaagccctggaatccttataaaattgcaaggaaggagtggaaaaagaatgaacatttcagaaaggatttgaaaaaagatgaattctag

SEQ ID NO: 251 - DNA, 378 bp, African swine fever virus
atgctggtgattatcctgggagttattggcctgctggccagtagcaacttggtttcatcctccacttctactcgggtaggtggacatcttcctctaacatttgatcctccagagaatgaacttggatactggtacacttatgtggaaagttgtcggttctgctgggattgtgaagatggggtctgtactagcagggtttggggaaacaactccacaagtattgttgagaatgactatgtaaaatattgtgaggtttctcgctggggtgaccaatgtagatatgatgtggaggagcacatttactataccatgaactgttctgacccaaagccctggaatccttataaaattgcaaaggaaggagtggaaaaaggatga

SEQ ID NO: 252 - DNA, 414 bp, African swine fever virus
atgctggtgattatcctgggagttattggcctgctggccagtagcaacttggtttcatcctccacttctactcgggtaggtggacatcttcctctaacagaggatcctccagagaatgaacttggatactggtgcacttatgtggaaagctgtcggttctgctgggattgtgaagatgggatttgtactagcagggtttggggaaacaactccacaagtattgttgagaacgactatgtaaaatattgtgaggtttctcgctggggtgaccaatgtagatatgatgtagaggagcacatttactataccatgaactgttctgacccaaagccctggaatccttataaaattgcaaggaaggagtggaaaaaggatgaacattccagaaagaatttgaaaaaagatgaattctag

SEQ ID NO: 253 - DNA, 414 bp, African swine fever virus
atgctggtgattatcctgggaattattggcctgctggccagtagcaacctggtttcatcctccacttctactcgggtaggtggacatcttcctctaacatttgatcccccagagaatgaacttggatactggtgcacttatgtggaaagctgtcggttctgctgggattgtgaagatgggatttgtaccagcagggtttggggaaacaactccacaagtattgttgagaatgactatgtaaaatattgtgaggtttcccgctggggaaacctatgtagatatgatgtggaggagcacatttactatagcatgaactgttctgacccaaagccctggaatccttataaaattgcaaggaaggagtggaaaaagaatgaatatctcagaaaggatttgaaaaaagatgaattctag

SEQ ID NO: 254 - DNA, 105 bp, African swine fever virus
atgaactgttctgacccaaagccctggaatccttataaaattgcaaggaaggagtggaaaaagaatgaacatcccagaaaggatttgaaaaaagatgaattctag

SEQ ID NO: 255 - DNA, 414 bp, African swine fever virus
atgctggtgattatcctgggaattattggcctgctggccagtagcaacctggtttcatcctccacttctactcgggtaggtggacatcttcctctaacatttgatcccccagagaatgaacttggatactggtgcacttatgtggaaagctgtcggttctgctgggattgtgaagatgggatttgtaccagcagggtttggggaaacaactccacaagtattgttgagaatgactatgtaaaatattgtgaggtttcccgctggggtaacctatgtagatatgatgtggaggagcacatttaccatagcatgaactgctctgacccaaagccctggaatccttataaaattgcaaggaaggagtggaaaaagaatgaacatcccagaaaggatttgaaaaaagatgaattctag

SEQ ID NO: 256 - DNA, 414 bp, African swine fever virus
atgctggtgattatcctgggaattattggcctgctggccagtagcaacctggtttcatcctccacttctactcgggtaggtggacatcttcctctaacatttgatccccccgagaatgaacttggatactggtgcacttatgtggaaagctgtcggttctgctgggattgtgaagatgggatttgtaccagcagggtttggggaaacaactccacaagtattgttgagaatgactatgtaaaatattgtgaggtttcccgctggggtaacctatgtagatatgatgtggaggagcacatttaccatagcatgaactgctctgacccaaagccctggaatccttataaaattgcaaggaaggagtggaaaaagaatgaacatcccagaaaggatttgaaaaaagatgaattctag

SEQ ID NO: 257 - DNA, 1587 bp, African swine fever virus
atgttctccctacaggacctctgtcggaagaacactttcttccttccaaatgattttagcaagcatactctacaacggctggggttgtattggaaagagcatggatccgtccatcgaatagaaaaggacagcataatgatacagaatgaattggttctttctatcaatgatgctttacagcttgcaggagaggagggggacacagatgtggtacagctcttgttactatgggagggaaatctgcattatgccatcataggagctttgaagactgagaattataatctagtatgtgagtaccatagccaaattcaggactggcatattctcctacccttgattcaagatccagaaacattcgaaaaatgtcatgatttaagccttggatgtgaccttatatgccttctccaacatgctgtaaaatgtgatatgctttctattcttgttaaatataaggaggatttactaaatgtaaggattaggcatcgtacccaatccctgtttgttttggcatgcgaaaatcggagatttgagattattgaatggataggtcaaaatctgtcaattcctgaacctgaggccatttttagcattgctattgttacaaaagatgtagaactgttttccttaggatataaaattatttttgattacatgcaaagacaaggaatttttcaattaaccaatgtagttcgcatgcttctgctaaatcgtcatattggtatggcaatagaaaaaggacttttaccttttattctggaaactttaaaatatggtggtagtgtaaaaagagctttatcttatgcagtaatagataataaaagaaaaattatagactatcttgtacgccatgaaaatataccccgaggaactattgaaagacttttgcatctagctgtgaaaaaacaatcttccaggaaaactttgaacttgttgctatcttacataaattacaaggtgaaaaatgttaaaaagctggtagagcatgtagtagatcacaaatccactcttgtgttaaaaattttattggaaaaaaaggaaaatctagtggatgctgttttaacaagacttgtaaaacattctacatatttccaggtgagagaatttatccaggagttttccatcagcccagaaaaattcattaaaatagctgtgcgggaaaagaaaaatgtgttaatcgaggctatttctgaagatatttgggaaaatcccacagaaagaattacttatctcaaacagatagtgcacaccataaaatatgaaagtggaaggcggtttttgatagacatcattcacagcatttaccaaagttactcactaaaacacgaagatattcttaaactggcaacattttatgtcaaacacaatgcaatcacccattttaaagatctctgcaaatatctttggctgaacagaggaacagaaagtaagaaactgtttttagagtgcttggaaattgctgatgagaaggagtttcctgatattaaaaatattgtgagtgaatatattaactacttgtttactgcaggagctattaccaaggaagaaatcatgcaagcttatgctttagagtatgacatgtattaa

SEQ ID NO: 258 - DNA, 1587 bp, African swine fever virus
atgttctccctacaggacctctgtcggaagaacactttcttccttccaaatgattttagcaagcatactctacaacggctggggttgtattggaaagagcatggatccgtccatcgaatagaaaaggacagcataatgatacagaatgaattggttctttctatcaatgatgctttacagcttgcaggagaggagggggacacagatgtggtacagctcttgttactatgggagggaaatctgcattatgccatcataggagctttgaagactgagaattataatctagtatgtgagtaccatagccaaattcaggactggcatattctcctacccttgattcaagatccagaaacattcgaaaaatgtcatgatttaagccttggatgtgaccttatatgccttctccaacatgctgtaaaatgtgatatgctttctattcttgttaaatataaggaggatttactaaatgtaaggattaggcatcgtacccaatccctgtttgttttggcatgcgaaaatcggagatttgagattattgaatggataggtcaaaatctgtcaattcctgaacctgaggccatttttagcattgctattgttacaaaagatgtagaactgttttccttaggatataaaattatttttgattacatgcaaagacaaggaatttttcaattaaccaatgtagttcgcatgcttctgctaaatcgtcatattggtatggcaatagaaaaaggacttttaccttttattctggaaactttaaaatatggtggtagtgtaaaaagagctttatcttatgcagtaatagataataaaagaaaaattatagactatcttgtacgccatgaaaatataccccgaggaactattgaaagacttttgcatctagctgtgaaaaaacaatcttccaggaaaactttgaacttgttgctatcttacataaattacaaggtgaaaaatgttaaaaagctggtagagcatgtagtagatcacaaatccactcttgtgttaaaaattttattggaaaaaaaggaaaatctagtggatgctgttttaacaagacttgtaaaacattctacatatttccaggtgagagaatttatccaggagttttccatcagcccagaaaaattcattaaaatagctgtgcgggaaaagaaaaatgtgttaatcgaggctatttctgaagatatttgggaaaatcccacagaaagaattacttatctcaaacagatagtgcacaccataaaatatgaaagtggaaggcggtttttgatagacatcattcacagcatttaccaaagttactcactaaaacacgaagatattcttaaactggcaacattttatgtcaaacacaatgcaatcacccattttaaagatctctgcaaatatctttggctgaacagaggaacagaaagtaagaaactgtttttagagtgcttggaaattgctgatgagaaggagtttcctgatattaaaagtattgtgagtgaatatattaactacttgtttactgcaggagctattaccaaggaagaaatcatgcaagcttatgctttagagtatgacatgtattaa

SEQ ID NO: 259 - DNA, 1578 bp, African swine fever virus
atgttctccctacaggacctctgtcggaagaacattttcttccttccaaatgattttagcaagcataccctacaatggctgggattatattggaaagagcatggatccgtccatcgagcagaaaaagacagcataatgatacagaatgaattggttctttctatcaatgatgctttacagcttgcaggagaggagggggacacagatgtagtacagctcttgttattatgggagggaaatctgcattatgccatcataggagccttgaagactgaaaaatataacctaatatgtgagtatcatagccaaattcaggactggcatattctcctacccatgattcaagatccagaaacattcgaaaaatgtcatgatttaagccttggatgtgactttatttgccttctccaacatgctgtaaaatacaacatgctttctattcttgtcaaatataaggaggatctactaaatgcaaggattaggcatcgtatccaatccctgtttgttttggcatgcgaaaatcggagaattgaaattattgattggataggccaaaatctgccaattcctgaacctgatgccatttttagcattgctgttgctacaagagatttagaactgttttccttagggtacaagattatttttgattacatgcaaagacagggaatcattcaattaaccaatggagttcgcatggttgtgctaaatcgtcacattagcatggcaatagataatggtcttttaccttttgttctggaaactttaaaacatggtgggaatatacatagagccttatcttatgcagtaacacacaatagaagaaaaattctggattatcttattcgccagaaaaatatagcccctaatacaattgaaagacttttatatctggccgtgaaaaatcaatcttccaggaaaactttgaacttgttgctatcttacataaattacaaggtgaaaaatgttaaaaagctggtagagcatgtagtaaatgagaaatccactcttgtgttaaaaattttattagaaaaaaaggaaaatctagtggatgctgttttaacaagacttgtaaaacattctacatatttccaggtgagagaatttatccaggagttttccatcagcccagaaaaattcattaaaatagctgtgcgggaaaagaaaaatgtgttaatcgaggctatttctgaagatatttgggaaaatcccacagaaagaattacttatctcaaacagatagtgcacaccataaaatatgaaagtggaaggcgatttttggtagacatcattcacagcatttaccaaagttactcactaaaacacgaagatattcttaaactggcaacattttatgtcaaacacaatgcaatcacccattttaaagacctctgcaaatatctttggctgaacagaggaacagaaagtaagaaactgtttttagagtgtttagaaattgctgatgagaaggagtttcctgatattaaaagtattgtgagtgaatatattaactacttgtttactgcaggagctattaccaaggaagaaatcatgcaagcctatgatgctttagagtag

SEQ ID NO: 260 - DNA, 1578 bp, African swine fever virus; identical to SEQ ID NO: 259

SEQ ID NO: 261 - DNA, 1578 bp, African swine fever virus
atgttctccctacaggacctctgtcggaagaacactttcttccttccaaatgattttagcaatcataccctacaacggctggggttatattggaaagagcatggatccgtccatcgaatagaaaaggacagcataatgatacagaatgaattggttctttctatcaatgatgctttacatcttgcaggagaggaggggaacacagatgtagtacagctcttgttattatgggagggaaatctgcattatgccatcataggagccttgaagactgagaaatataacctaatatgtgagtaccatagccaaattcagaactggcatgttctcctccccttgattcaagatccagaaacattcgaaaaatgtcatgatttaagccttggatgtgactttatttgccttctccaacatgctgtaaaatgtgacatgctttctattcttgttaaatataaggaggatctactaaatgcaaggattaggcatcgtatccaatccctgtttgttttggcatgcgaaaatcggagatttgagattattgaatggataggtcaaaatctgccaattcctgaacctgaggccatttttagcattgctattgttacaaaagatatagaactgttttccttagcgtacaagcttatttttgattacatgcaaagacaaggaacttttcaattaaccaatatggtccgcatgcttctgctaaatcggtacattggtatggcaatagaaaaaggacttttaccctttattctggaaactttaaaatatggtggtagtgtaaatagagctttatcttatgcagtaatagataataaaagaaaaattatagactatcttgtacgccatgaaaatataccccgtggaactattgaaagacttttgcatctagctgtgaaaaaacaatcttccagaaaaactttgaacttgttgctatcttacataaattacaaggtgaaaaatgttaaaaagctggtagagcatgtagtagatcacaactctactcttgtgttaaaaattttattggaaaaaaaggaaaatctagtggatgctgttttaacaagacttgtaaaacattctacatatttccgggtaagagaatttatccaggagttttccatcagcccagaaaaattcattaaaatagctgtgcgggaaaagaaaaatgtgttaatcgaggctatttctgaagatatttgggaaaatcccacagaaagaattacttatctcaaacagatagtgcacaccataaaatatgaaagtggaaggcggtttttgatagacatcattcacagcatttaccaaagttattcactaaaacatgaagatatttttaaactggcaacattttatgtcaaacacaatgcaatcacccattttaaagatctctgcaaatatctttggctgaacagaggaacagaaagtaagaaactgtttttagagtgcttggaaattgctgatgagaaggagtttcctgatattaaaagcattgtgagtgaatatattaactacttgtttactgcaggagctattaccaaggaagaaatcatgcaagcctataatgctttagagtag

SEQ ID NO: 262 - DNA, 1557 bp, African swine fever virus
atgttctcccttcaggacctctgtcggaagaacattttcttccttccaaacgattttagcaagcataccctacaatggctggggttatattggaaagagcatggatccgtccatcgagcagaaaaagacagcataatgatacagaatgaattggttctttctatcaatgatgctttactgcttgcaggagaggagggggacacagatgtagtacagctcttgttgctatgggaaggaaatctgcattatgccatcataggagccttgaagactgagaaatatagcctagtatgtgagtaccatagccaaattcaggactggcatgttctcctccccttgattcaagatccagaaacattcgaaaaatgtcatgatttaagccttgaatgtgactttatatgccttctacaacatgctgtaaaatgtgacatgctttctattcttgttaaatataaagaggatctactaaatgtaaggattaggcatcgtatccaatccctgtttgttttggcatgcgaaaatcggagatttgagattattgaatggataggtcaaaatctgccaattcctgaacctgaggccatttttagcattgctattgttacaaaagatatagaactgttttccttaggatacaagcttatttttgattacatgcaaagacaaggaacttttcaattaaccaatatggttcgcatgcttctgctaaatcgttacattggtatggcaatagaaaaaggccttttaccctttatcgtggaaactttaaaatatggtggtagtgtaaatagagctttatcttatgcagtcatagataataaaagaaaaattatagactatcttgtacgtcatgaaaatataccccgtggaactattgaaagacttttgcatctagctgtgaaaaaacaatcttccagaaaaactttgaacttgttgctatcttacataaactacaaggtgaaaaatgttaaaaagctggtagagcatgtagtagatcacaactctacccttgtgttaaaaattttattggaaaaaaaggaaaatttagtggatgctgttttaacaagacttgtaaaacattctacatatttccgggtgagagaatttatccaggagttttccatcagcccagaaaaattcattaaaatagctgtgcgggaacagaaaaatgtgttaatcgaggctatttctgaagatatttgggaaaatcccacagaaagaattacttatctcaaacagatagtgcacaccataaaatatgaaagtggaaggcggtttttgatagacatcattcacagcatttaccaaagttactcactaaaacacgaagatattcttaaactggcaatattttatgtcaaatacaatgcaatcacccattttaaagatctctgcaaatatctttggctgaacagaggaacagaaagtaagaaactgtttttagagtgcttggaaattgctgatgagaaggagtttcctgatattaaaagcattgtgagtgaatatattaactacttgtttactgcaggagctattactaaggaagaaatcatataa

SEQ ID NO: 263 - DNA, 1581 bp, African swine fever virus
atgttctcccttcaggacctctgtcggaagaacactttcttccttccaaatgattttagcaagcataccctacaacggctggggttatattggaaagagcatggatccgtccatcgagcagaaaaagacagcataatgatacagaatgaattggttctttctatcaatgatgctttacagcttgcaggagaggagggggacacagatgtagtacagctcttattattatgggaaggaaatcttcattatgccatcataggagccttgaagactgagaaatataacctaatatatgagtaccatagccaaattcaggactggcatgttctcttacccatgattcaagatccagaaacattcgaaaaatgtcatgatttaagccttgcatgtgactttatatgccttctccaacatgctataaaatataacatgctttctatccttgtcaaatataaggaagacttactaaatgtaaggattaggtatcgtatccaatccctgtttgttttggcatgtgaaaaccggagaattgagattattgaatggataggtcaaaatctgccaattcctgaacctgatgccatttttagcattgctgttgctacaagagatttagaactgttttccttagggtacaagattatttttgattacatgcaaagacagggaatctttcaattaaccaatggagttcgcatggttgtgctaaatcgtcacattagcatggcaatagataatggtcttttaccctttgttctggaaactttaaaacatggtgggaatatacatagagccttatcttatgcagtaacacacaataaaagaaaaattctggattatcttattcgccagaaaaatatagcccctaatacaattgaaagacttttatatctggccgtgaaaaatcaatcatccagaaaaactttgaacttgttactatcttacataaattacaaggtgaaaaatgttaaaaagctggtagagcatgtagtaaatgagaaatccactcttgtgttaaaaattttattagaaaaaaaggaaaatctagtggatgctgttttaacaagacttgtaaaacattctacatatttccaggtgagagaatttatccaggagttttccatcagcccagaaaaattcattaaaatagctgtgcgggaaaagaaaaatgtgttgatcgaggctatttctgaagatatttgggaaaatcccacagaaagaattacttatctcaaacagatagtgcacaccataaaatatgaaagtggaaggcgatttttggtagacatcattcacagcatttaccaaagttactcactaaaacacgaagatattcttaaactggcaacattttatgtcaaacacaatgcaaccacccattttaaagatctctgcaaatatctttggctgaacagaggaacagaaagtaaaaaactctttttagagtgtttagaaattgctgatgagaaggagtttcctgatattaaaagcattgtgagtgaatatattaactacttgtttactgcaggagctattaccaaggaagaagcctatggatgctttagagtagccatgtattaa

SEQ ID NO: 264 - DNA, 1578 bp, African swine fever virus
atgttctccctacaggacctctgtcggaagaacattttcttccttccaaacgattttagcaagcataccctacaatggctggggttatattggaaagagcatggatccgtccatcgagcagaaaaagacagcataatgatacagaatgaattggttctttctatcaatgatgctttactgcttgcaggagaggagggggacatagatgtagtacagctcttgttattatgggagggtaatctgcattatgccatcataggagccttgaagactgagaaatataacctaatatgtgagtaccatagccaaattcaggactggcatattctcctacccatgattcaagatccagaaacattcgaaaaatgtcatgatttaagccttgcatgtgactttatatgccttctccaacatgctgtaaaatataacatgctttctatccttgtcaaatataaggaagacttactaaatgtaaggattaggtatcgtatccaatccctgtttgttttggcatgcgaaaaccggagaattgagattattcattggataggccaaaatctgccaattcctgaacctgatgccatttttagcattgctgttgctacaagagatttagaactgttttccttagggtacaagattatttttgattacatgcaaagacagggaatctttcaattatccaatggagttcgcatggttgtgctaaatcgtcacattagcatggcaatagataatggacttttaccctttgttctggaaactttaaaacatggtgggaatatacatagagccttatcttatgcagtaacacacaatagaagaaaaattctggattatcttattcgccagaaaaatatagcccctaatacaattgaaagacttttatatctggccgtgaaaaatcaatcttccaggaaaactttgaacttgttgctatcttacataaattacaaggtgaaaaatgttaaaaagctggtagagcatgtagtaaatgagaaatccactcttgtgttaaaaattttattggaaaaaaaggaaaatctagtggatgctgttttaacaagacttgtaaaacattctacatatttccaggtgagagaatttatccaggagttttccatcagcccagaaaaattcattaaaatagctgtgcgggaaaagaaaaatgtgttaatcgaggctatttctgaagatatttgggaaaatcccacagaaagaattacttatctcaaacagatagtgcacaccataaaatatgaaagtggaagacgatttttgatagagatcattcacagcatttaccaaagttactcactaaaacacgaagatattcttaaactggcaacattttatgtcaaacacaatgcaaccacccattttaaagatctctgcaaatatctttggctgaacagaggaacagaaagtaagaaactgtttttagagtgtttagaaattgctgatgagaaggagtttcctgatattaaaagtattgtgagtgaatatattaactacttgtttactgcaggaactattaccaaggaagaaatcatgcaagcctatgatgctttagagtag

SEQ ID NO: 265 - DNA, 1578 bp, African swine fever virus
atgttctcccttcaggacctctgtcggaagaacattttcttccttccaaatgattttagcaagcataccctacaatggctggggttatattggaaagagcatggatccgtccatcgagcagaaaaaaacagcatagtgatacagaatgaattggttctttctatcaatgatgctttacagcttgcaggggaagagggggacacagatgtagtacagctcttgttattatgggagggaaatctgcattatgccatcataggagccttgaagactgagaaatataatctaatatgtgagtaccatagccaaattcaggactggcatgttctcctccccttgattcaagatccagaaacattcgaaaaatgtcatgatttaagccttgcatgtgactttatatgccttctacaacatgctgtaaaatataacatgctttctatccttgtcaaatataaggaagacttactaaatgtaaggattaggtatcgtatccaatccctgtttgttttggcatgtgaaaaccggagaattgagattattgattggataggccaaaatctgccaattcctgaacctgatgccatttttagcattgctgttgctacaagagatttagaactgttttccttagggtacaagattatttttgattacatgcaaagacagggaatctttcaattatccaatggagttcgcatggttgtgctaaatcgtcacattagcatggcaatagataatggacttttaccctttgttctggaaactttaaaacatggtgggaatatacatagagccttatcttatgcagtaacacacaatagaagaaaaattctggattatcttattcgccagaaaaatatagcccctaatacaattgaaagacttttatatctggccgtgaaaaatcaatcttccaggaaaactttgaacttgttgctatcttacataaattacaaggtgaaaaatgttaaaaagctagtagagcatgtagtaaatgagaaatccactcttgtgttaaaaattttattggaaaaaaaggaaaatctagtggatgctgttttaacaagacttgtaaaacattctacatatttccaggtgagagaatttatccaggagttttccatcagcccagaaaaattcattaaaatagctgtgcgggaaaagaaaaatgtgttaatcgaggctatttctgaagatatttgggaaaatcccacagaaagaattacttatctcaaacagatagtgcacaccataaaatatgaaagtggaagacgatttttgatagacatcattcacagcatttaccaaagttactcactaaaacacgaagatattcttaaactggcaacattttatgtcaaatacaatgcaatcacccattttaaagatctctgcaaatatctttggctgaacagaggaacagaaagtaagaaactgtttttagagtgtttagaaattgctgatgagaaggagtttcctgatattaaaagcattgtgagtgaatatattaactacttgtttactgcaggagctattaccaaggaagaaatcatgcaagcctatgatgctttagagtag

SEQ ID NO: 266 - DNA, 618 bp, African swine fever virus
atgttggtgatcttcttgggaattcttggccttctggccagccaggtttcaagtcagctcgttggacaacttcgtccaacagaggagcctccagaggaagaactcgaatactggtgtgcctacatggaaagttgccaattttgctgggactgccaagacggcacttgtataaacaaaatagatgggtcagtaatttacaagaatgagtatgtgaaatcatgtctggtttcccgttggctggataaatgtatgtatgatttagataagggtatctaccataccatgaattgcaaccaggtcttagggctacctaatcaaccagctggacaacttcatccaacggataatcctccacaagaagaacttgaatactggtgcacttatacagaaaactgcaagttttgctggaattgtcaaaatggcctttgtgagggcaaattggagaatacaacaattcttgaaaatgagtatgtgcaatcatgtatagtttcccgctggctaaataaatgtatgtatgatctaggacaggggattcaccatgtaatggcctgttctgaaccaaagccctggaatccttacaaaatcttaaagagagagtggaaagaaaataatagttaa

SEQ ID NO: 267 - DNA, 618 bp, African swine fever virus; identical to SEQ ID NO: 266

SEQ ID NO: 268 - DNA, 372 bp, African swine fever virus
atgttggtgatcttcttgggactccttggcctgctggccaaccaggtcttagggctacctaatcaaccagctggacaacttcatccaacggataatcctccaaaagaagaacttggatactggtgcacttacacggaaagctgtaaattttgctggaactgtcaaaatggcctttgtgagggcaaattggagaatacaacaattcttgaaaatgagtatgtgcaatcatgtatagtttcccgctggctaaataaatgtatgtatgatctaggacaggggattgaccatgtaatggcctgttctgaaccaaagccctggaatccttacaaaatcttaaagagagagtggaaaaaaaatgtcagccaaaattaa

SEQ ID NO: 269 - DNA, 372 bp, African swine fever virus
atgttggtgatcttcttgggactccttggcctgctggccaaccaggtcttagggctacctaatcaaccagctggacaacttcatccaacggataatcctccaaaagaagaacttggatactggtgcacttacacggaaagctgtaaattttgctggaactgtcaaaatggcctttgtgagggcaaattggagaatacaacaattcttgaaaatgagtatgtgcaatcatgtatagtttcccgctggctaaataaatgtatgtatgatctaggacaggggattcaccatgtaatgccctgttctgaaccaaagccctggaatccttacaaaatcttaaagaaagagtggaaagaaaatgtcagccaaaattaa

SEQ ID NO: 270 - DNA, 363 bp, African swine fever virus
atgttggttatcttcttgggaattcttggccttctggccaaccaggtctcaagccagctcgttggacaacttcatccaacggaaaatccttcagagaatgaacttgaatactggtgcacttacatggaatgttgccagttttgctgggactgtcaagatggcctttgtgtgaataagttgggaaatacaacaattcttgaaaatgagtatgtgcatccatgtatagtttcccgctggctaaataaatgtatgtatgatctgggtcaaggcattgatcatgtaatggtctgttctcaaccaaagtactggaatccttataaaatcttaaagaaagagtggaaagaaaataacagccaaaattaa

SEQ ID NO: 271 - DNA, 363 bp, African swine fever virus
atgttagtaatcttcttgggaattcttggccttctggccaaccaggtctcaagccagctcgttggacaacttcatccaacggaaaatccttcagagaatgaacttgaatactggtgcacttacatggaatgttgccagttttgctgggactgtcaagatggcctttgtgtgaataagttgggaaatacaacaattcttgaaaatgagtatgtgcatccatgtatagtttcccgctggctaaataaatgcatgtatgatctgggtcaaggcattgatcatgtaatggtctgttctcaaccaaagtactggaatccttataaaatcttaaagaaagagtggaaagaaaataacagtcaaaattaa

SEQ ID NO: 272 - DNA, 366 bp, African swine fever virus
atgttagtaatcttcttgggaattcttggccttctggccaaccaggtctcaagccagctcgttggacaacttcatccaacggaaaatccttcagagaatgaacttgaatactggtgcacttacatggaatgttgccagttttgctgggactgtcaaaatggcctttgtgtgaataagttgggaaatacaacaattcttgaaaatgagtatgtgcatccatgtatagtttcccgctggctaaataaatgtatgtatgatctgggtcaaggcattgatcatgtaatggtctgttctcagccaaaatactggaatccttataaaatcttaaagaaagagtggaaagaaaataacagccaaaataaataa

SEQ ID NO: 273 - DNA, 357 bp, African swine fever virus
atgttagtcatcttcttgggaattcttggccttctggtcaaccaggtctcaagccagccagttggacaacttcatccaacggaaaatccttcagagaatgaacttgaatactggtgcacttacatggaatgttgccagttttgctgggactgtcaaaatggcctttgtgtgaataagttgggaaatacaacaattcttgaaaatgagtatgtgcatccatgtatagtttcccgctggctaaataaatgtatgtatgatctgggtcaaggcattgatcatgtaatggtctgttctcaaccaaaatactggaatccttataaaatcttaaagaaagagtggaaagaaaataatagttaa

SEQ ID NO: 274 - DNA, 366 bp, African swine fever virus
atgttagtaatctttttgggaattcttggccttctggccaaccaggtctcaagccagctcgttggacaacttcatccaacggaaaatccttcagagaatgaacttgaatactggtgcacttacatggaatgttgccagttttgctgggactgtcaaaatggcctttgtgtgaataagttgggaaatacaacaattcttgaaaatgagtatgtgcatccatgtatagtttcccgctggctaaataaatgtatgtacgatctgggtcaaggcattgatcatgtaatggtctgttctcaaccaaaatactggaatccttataaaatcttaaagaaagagtggaaagaaaataacagccaaaataaataa

SEQ ID NO: 275 - DNA, 366 bp, African swine fever virus
atgttagtaatcttcttgggaattcttggccttctggccaaccaggtctcaagccagctcgttggacaacttcatccaacggaaaatccttcagagaatgaacttgaatactggtgcacttacatggaatgttgccagttttgctgggactgtcaaaatggcctttgtgtgaataagttgggaaatacaacaattcttgaaaatgagtatgtgcatccatgtatagtttcccgctggctaaataaatgtatgtacgatctgggtcaaggcattgatcatgtaatggtctgttctcaaccaaaatactggaatccttataaaatcttaaagaaagagtggaaagaaaataacagccaaaataaataa

SEQ ID NO: 276 - DNA, 312 bp, African swine fever virus
atgaaggtttttctaggacttttactaggttattcaaccatcctcattcttacatatcaatcaccaacaacccagtggtgtttttatgaaatatcacttaaaatacttaatcatcatagcatggaaaaatggagggataagaattggtcaatcattataaggtattattgtttttaccttgtatttagctttgcatttgctggttgcgttgcatttgcgatctgcaaaaatctacgactgtgtacaaccatgaaattacttatgcttttgaatattttggttttgttatctcagccaattttgaataattga

SEQ ID NO: 277 - DNA, 360 bp, African swine fever virus
atgaaggtttttctaggacttttactaggttattcaaccatccttattcttacctatcaatcaccaacaaccccgtggtgtttttatgaaatatcacttaaaatacctaatcatcatagcatgaaatgttgttcgtatcctagactttatgaacatgaaatgttcatggaaaaatggagggataagaattggccaatcattataaggtattattgtttttaccttgtatttagctttgtatttgctggttgcgttgcatttgcgatctgcaaaaatctacgactgagtacaaccatgaaattacttatgcttttgagtattttggttttgttgttatctcagccaatcttgaataattga

SEQ ID NO: 278 - DNA, 360 bp, African swine fever virus; identical to SEQ ID NO: 277

SEQ ID NO: 279 - DNA, 507 bp, African swine fever virus
atgaaggtttttctaggacttttactaggtttttcaatcatcctcattcttacatatcaatcaccgacaactcagcatcctcctaaggaagagcttgcgtactggtgcacttatgcaaaatcttgtgacttctgctgggattgccaaaatgacacttgtataaataaggtaataaatgagtctatttcgataacttcgattgtaaactgtagagttactcgcgattcccaatcctgtttttatgaaatatcagttaaaatacctaatcatcatagcatggaatgttcatatcctagactttatgaacatgaaatgtttatggaaaaatggagggatgagtattggccaatcattataaaacagtgttgtttttaccttgtatttagcattgcatttgctggatgcgttgcatttgcgatctgcaaaaatctacgactgcgtacaactataaaactacttattcttttgagtattttggtttggttgtctcaaccagtcttgaattga

SEQ ID NO: 280 - DNA, 516 bp, African swine fever virus
atgaaggtttttctggcacttttactaggttatttaactatcctcattcttacatatcaaacaccaacaacccagcatcctcctaaggaggagcttccatattggtgtacgtatgtaaagaattgcgacctctgttgggattgtcaagatagcatctattggaacaaggtaataagtgagtctatttcgataaattcgattataaactgtagagttacttgcgattcccaatctcagtcctgcttttatgaaatattacttaaaatacctaatcatcatagcatggaatgttcttatcctggatcgtatgaaaatgaaatgttcatggaaaaatggagggatgagaattggtcaatcattataaaacattattgtttttaccttgtatttagctttgcatttgctggttgcgttgcatttgcgatctgcaaaaatctacgactgagtacaactatgaaattacttatgcttttgagtattttggtttgcttatctcagccaatcttgaataattga

SEQ ID NO: 281 - DNA, 510 bp, African swine fever virus
atgaaggtttttctaggacttttactaggtttttcaatcatcctcattcttacatatcaatcaccgacaacccagcatcctcctaaggaagagcttgcgtactggtgcacttatgcaaaatcttgtgacttctgctgggattgccaaaatgacacttgtataaataaggtaataaatgagtctatttcgataacttcgattgtaaactgtagagttactcgcgattcccagtcctgtttttatgatatatcagttaaaatacctaatcatcatagcatggaatgttcatatcctagactttatgaacatgaaatgtttatggaaaaatggagggatgagtattggccaatcattataaaacagtgttgtttttaccttgtatttagctttgcatttgctggttgcgttgcatttgcgatctgcaaaaacctacgactgcgtacaactataaaactacttattcttttgagtattttggtttggttatctcagccaatcttgaataattga

SEQ ID NO: 282 - DNA, 312 bp, African swine fever virus; identical to SEQ ID NO: 276

SEQ ID NO: 283 - DNA, 516 bp, African swine fever virus
atgaaggtttttctaggacttttactaggttattcaaccatcctcattcttacatatcaatcaccaacaacccagcatcctcctaaggaagagcttgagtattggtgcacttatgcaaaaacttgtgacttctgctgggattgccaaaatgacacttgtataaataaggtaataaatgaatctatttcgatgaattcgattgtaaactgtagagttactcgcgattcccaatcccagtcctgtttttatgaaatatcacttaaaatacctaattatcatagcatggaatgttcatatcctagactttataaacatttcatgtccatggaaaaatggagggatgagaattggccaatccttataagacattattgtttttaccttgtatttagctttgcatttgctggttgcgttgcatttgcgatctgcaaaaatctacgactgcgtacaaccatgaaattacttatgcttttgagtattttggttttgttatctcagccaatcttgaataattga

SEQ ID NO: 284 - DNA, 324 bp, African swine fever virus
atgaacgcaaccatgaaggtttttctaggacttttactaggttattcaaccatcctcattcttacatatcaatcaccgacaacccagtggtgtttttatgaaatatcacttaaaatacttaatcatcatagcatggaaaaatggagggataagaattggtcaatcattataaggtattattgtttttaccttgtgtttagctttgcatttgccggttgcgttgcatttgcgatctgcaaaaatctacgactgtgtacaaccatgaaattacttatgcttttgggtattttggttttgttatctcagccaatcttgaataattga

SEQ ID NO: 285 - DNA, 354 bp, African swine fever virus
atgaaggtttttctaggacttttactaggttattcaaccatcctcattcttacatatcaatcaccagcaacccagtggtgtttttatgaaatatcacttaaaatacctaatcatcatagcatggaatgttcatatcctagactttataaacatttcatattcatggaaaaatggagggataagaattggtcaatcattataaggtattattgtttttaccttgtatttagttttgcatttgctggttgcattgcatttgcgatctgcaaaaatctacgactgtgtacaactatgaaattacttatgcttttgagtattttggttttgttatctcagccaatcttgaataattga

SEQ ID NO: 286 - DNA, 354 bp, African swine fever virus
atgaaggtttttctaggacttttactaggttattcaaccatcctcattcttacatatcaatcaccagcaacccagtggtgtttttatgaaatatcacttaaaatacctaatcatcatagcatggaatgctcatatcctagactttataaacatttcatgttcatgaaaaaatggagggataagaattggtcaatcattataaggtattattgtttttaccttgtatttagttttgcatttgctggttgcattgcatttgcgatctgcaaaaatctacgactgtgtacaactatgaaattacttatgcttttgagtattttggttttgttatctcagccaatcttgaataattga

SEQ ID NO: 287 - DNA, 714 bp, African swine fever virus
atgttagaaatagtattggcaacgctgctaggcgacctgcagcggctccgggttcttacccctcagcagcgggcagttgccttctttcgagccaatactaaggagctagaggacttcttatgctcagatgggcagtctgaggaggtactgtctggcccccttcttaaccgtctactagaaccctcaggccctcttgatattttaaccggatatcacctatttcgtcagaatcccaaggcaggtcagttgcgcggccttgaggtcaagatgcttgaacggttatacgatgctaatatttacaatatactgtctcggctgcggcctgaaaaagttcgcaacaaggctattgagctatactgggttttccgagctatccatatttgtcatgctcctttagttttagatattgtacgatatgaggaaccggactttgctgaactggcctttatttgtgctgcttactttggtgaacctcaggtaatgtatttgctctacaaatatatgcctctgacccgcgcagttcttacggatgccatccggataagtcttgagagcaacaaccaggtagggatttgctatgcttacttgatgggaggcagcctcaagggactagtctccgccccactgcgtaaacgtctgcgcgccaaactacgctcgcagcgcaaaaagaaggacgttctttcaccccacgacttcttactgctgctccagtag

SEQ ID NO: 288 - DNA, 714 bp, African swine fever virus; identical to SEQ ID NO: 287

SEQ ID NO: 289 - DNA, 219 bp, African swine fever virus
atgcaaaataaaatcccaaattttaaccttttctttttttttctatacaggatgttagaaatagtattggcaacgctgctaggcgacctgcagcggctccgggttcttacccctcagcagcgggcggttgccttctttcgagccaatactaaggagctagaggacttcttacgctcagatgggcaatctgaggagatactgtctggcccccctccttaa

SEQ ID NO: 290 - DNA, 765 bp, African swine fever virus
atgcaaaataaaatcccaaattttaaccttttctttttttttctatacaggatgttagaaatagtattggcaacgctgctaggcgacctgcagcggctccgggttcttacccctcagcagcgggcggttgccttctttcgagccaatactaaggagctagaggacttcttacgctcagatgggcaatctgaggagatactgtctggccccctccttaaccgtctactagaaccctcatgccctcttgatattttaaccggatatcacctatttcgtcagaatcccaaggcaggtcagttgcgcggccttgaggtcaagatgcttgaacggttatacgatgctaatatttacaatatattgtctcggctgcgacctgaaaaagtccgcaacaaggctattgagctatactgggttttccgagctatccatatttgtcatgctcctttagttttagatattgtacgatatgaggaaccggactttgctgaactggcctttatttgtgctgcttactttggtgaacctcaggtaatgtatttgctctacaaatatatgcctctgacccgcgcagttcttacggatgccatccagataagtcttgagagcaacaaccaggtagggatttgctatgcttacttgatgggaggcagcctcaagggactagtctccgccccactgcgtaaacgtctgcgcgccaaactacgctcgcagcgcaaaaagaaggacgttctttcaccccacgacttcttactgctgctccagtag

SEQ ID NO: 291 - DNA, 765 bp, African swine fever virus
atgcaaaataaaatcccaaattttaaccttttctttttttttctatacaggatgttagaaatagtattggcaacgctgctaggcgacctgcagcggctccgggttcttacccctcagcagcgggcggttgccttctttcgagccaatactaaggagctagaggacttcttacgctcagatgggcaatctgaggagatactgtctggccccctccttaaccgtctactagaaccctcatgccctcttgatattttaaccggatatcacctatttcgtcagaatcccaaggcaggtcagttgcgcggccttgaggtcaagatgcttgaacggttatacgatgctaatatttacaatatattgtctcggctgcgacctaaaaaagtccgcaacaaggctattgagctatactgggttttccgagctatccatatttgtcatgctcctttagttttagatattgtacgatatgaggaaccggactttgctgaactggcctttatttgtgctgcttactttggtgaacctcaggtaatgtatttgctctacaaatatatgcctctgacccgcgcagttcttacggatgccatccagataagtcttgagagcaacaaccaggtagggatttgctatgcttacttgatgggaggcagcctcaagggactagtctccgccccactgcgtaaacgtctgcgcgccaaactacgctcgcagcgcaaaaagaaggacgttctttcaccccacgacttcttactgctgctccagtag

SEQ ID NO: 292 - DNA, 714 bp, African swine fever virus
atgttagaaatagtattggcaacgctgctaggtgacctgcagcggctccgggttcttacccctcagcagcgggcggttgccttctttcgagccaatactaaggagctagaggactttttatgctcagatgggcagtctgaggagatactgtccggccccctccttaaccgtctactagaaccctcaggccctcttgatattttaaccggatatcacttatttcgtcagaatcccaaggcaggtcaggtgcgcggccttgaggtcaagatgcttgaacggttatacgatgctaatatttacaatatattgtctcggctgcgacctgaaaaagttcgcaacaaggctgttgagctatactgggtttttcgggctatcaatatgtgtcatgctcctttagttttagatattgtacgatatgaggaaccggactttgctgaactggcctttatttgtgctgcttactttggtgaacctcaggtaatgtatttgctctacaaatatatgcctctgacccgcgcagttcttacggatgccatccagataagtcttgagagcaacagccaggtagggatttgctatgcctacttgatgggaggcagcctcaagggcctagtccgtgccccactacgtaaacgtctgcgcgccaaactacgctcgcagcgcaaaaagaaggacgttcttccaccccatgacttcttactgctgctccagtaa

SEQ ID NO: 293 - DNA, 714 bp, African swine fever virus
atgttagaaatagtattggcaacgctgctaggtgacctgcagcggctccgggttcttacccctcagcagcgggcggttgccttctttcgagccaatactaaggaggtagaagacttcttatgctcagatgggcagtctgaggaggtactgtccggccccctccttaaccgtctactagaaccctcaggccctcttgatattttaaccggatatcacttatttcgtcagaatcccaaggcgggtcaggtgcgcggccttgaggtcaagatgcttgaacggttatacgatgctaatatttacaatatattgtctcggctgcgacctgaaaaagttcgcaacaaggctgttgagctatactgggtttttcgggctatcaatatgtgtcatgctcctttagttttagatattgtacgatatgaggaaccggactttgctgaactggcctttatttgtgctgcttactttggtgaacctcaggtaatgtatttgctctacaaatatatgcctctgagccgcgcagttcttacggatgccatccagataagtcttgagagcaacagccaggtagggatttgctatgcctacttgatgggaggcagcctcaagggcctagtccgtgccccactacgtaaacgtctgcgcgccaaactacgctcgcagcgcaaaaagaaggacgttcttccaccccacgacttcttactgctgctccagtaa

SEQ ID NO: 294 - DNA, 714 bp, African swine fever virus
atgttagaaatagtattggcaacgctgctaggtgacctgcagcggctccgggttcttacccctcagcagcgggcggttgccttctttcgagccaatactaaagagctagaggacttcttatgtccagatgggcagtctgaggaggtgctgtctggctccctccttaaccgtctactagaaccctcaggccctcttgatattttaactggatatcacctatttcgtcagaatcccaaggcaggtcagttgcgcggccttgaggtcaagatgcttgaacggttatacgatgctaatatttacaacatattgtcccggctgcgacctgaaaaagttcgcaacaaggctgttgagctatactgggtttttcgggctatcaatatgtgtcatgctcctttagttttagatattgtacgaaatgaggaactggactttgctgaactggcctttatttgtgctgcttactttggtgagcctcaggtaatgtatttgctctacaaatatatgcctctgacccgcgcagttcttacggatgccatccagataagtcttgagagcaacagccaggtggggatttgctatgcctacttgatgggaggcagcctcaagggactagtccgtgccccgctacgtaaacgtctgcgcgccaaactacgctcgcagcgcaaaaagaaggatgttcttccaccccacgacttcttactgctgctccagtaa

SEQ ID NO: 295 - DNA, 774 bp, African swine fever virus
atgcaaaataaaatcccaaattttaaccttttctttttttttctatacaagatgttagaaatagtattggcaacgctgctgggtgatctgcagcaacttaaggatcttacacctaagcagcgggccgtagctttcttccgagccaacaccaaagagctagaggactttctctaccccgatgggcagactgaggagttactccctggatttcttcttaaccatttactagaaccctcaggccctattgaaattttaaccggatatcacctctttcgtcagaatccaaaggcaggtcgcttgcgaggccttgaggtgaaaatgcttgaacggttatatgatgctaatatttacaatatgctggctcggctacggcctgagttggttcgtgacaaggctgttgagctatattggctttttcgagctattttaatatgtcatggtcccttggttttggagattgtacgacatgagacgttggactttgcagaaaccgcctttatctgtgctgcttactttagtgaacctcaggtaatgtacgctctttataactttataccacccactcatgcagtccttgctgatgccatccagatgtgtcttgagagcaacagcgaggcagggatttgctatgtctacctaatgggaggtaacctcaagggcaaggtgcccggctcgctgcgcaaacgtctgcgtgccagtccacttcggcaagaacgcaaaaagaaaaacgtccttccgccccacgaattcctactcctgctccacgggatttaa

SEQ ID NO: 296 - DNA, 774 bp, African swine fever virus
atgcaaaataaaatcccaaattttaaccttttctttttttttctatacaagatgttagaaatagtattggccacgctgctaggtgatctgcagaaacttaaggatcttacacctccgcagcgggctgtggctttctttcgagccaacaccaaagagctagaggactttctctaccccgatgggcagtctgaggagttactccctggacttctccttaaccgtttactagaaccttcaggttctattgacattttaaccggttaccacctatttcgtgagaatccaaaggcaggtcgcttgcgaggccttgaggtgaaaatgcttgaacggttatatgatgctaatatttacaatatgctggctcggctacggcctgagttggttcgtgacaaggctattgagctatattggctctttcgggctattttaatgtgtcatagtcccttagttttggagattgtacgacatgagacaatggattttgcagaaaccgcctttatctgtgccgcttactttagtgaacctcaggtaatgtacgctctttataaatttatacctatctctcgtgcagtccttgctgatgccattcagatgtgtcttgagagcaacagcgaggcggggatttgctatgcttacctaatggggggtagcctcaagggcaaggtgcctggctcgctgcgcaaacgtctgcgtgccagtccacttcggcaagagcgcaaaaagaaaaacgtcctcccgccccatgaattcctactcatgctccatgggatttaa

SEQ ID NO: 297 - DNA, 765 bp, African swine fever virus
atgcaaaataaaatcccaaattttaaccttttctttttttttctatacaggatgttagaaatagtattggcaacgctgctaggtgacctgcagcggctccgggttcttacccctcagcagcgggcggttgccttctttcgagccaatactaaggagctagaggacttcttatgctcagatgggcagtctgaggagatactgtccggccccctccttaaccgtctactagaaccctcaggccctcttgatattttaaccggatatcacttatttcgtcagaatcccaaggcaggtcagttgcgcggtcttgaggtcaagatgcttgaacggttatacgatgctaatatttacaatatattgtctcggctgcgacctgaaaaagttcgcaacaaggctattgagctatactgggttttccgagctatccatatttgtcatgctcctttagttttagatattgtacgatatgaggaaccggactttgctgaactggcctttatttgtgctgcttactttggtgaacctcaggtaatgtatttgctctacaaatatatgcctctgacccgcgcagttcttacggatgccatccggataagtcttgagagtaacaaccaggtagggatttgctatgcttacttgatgggaggcagcctcaagggactagtctccgccccactgcgtaaacgtctgcgcgccaaactacgctcacagcgcaaaaagaaagacgttctttcaccccacgacttcttactgctgctccagtaa

SEQ ID NO: 298 - DNA, 765 bp, African swine fever virus
atgcaaaataaaatcccaaattttaaccttttctttttttttctatacaggatgttagaaatagtattggcaacgctgctaggcgacctgcagcggctccgggttcttacccctcagcagcgggcggttgccttctttcgagccaatactaaggagctagaggacttcttatgctcagatgggcagtctgaggagatactatctggcccccttcttaaccgtctactagaaccctcaggccctcttgatattttaactggatatcacctatttcgtcagaaccccaaggcaggtcagttacgcggccttgaggtcaagatgcttgaacggttatacgatgctaatatttacaatatattgtctcggctgcgacctgaaaaagttcgcaacaaggctattgagctttactgggtttttcgagctatccatatttgtcatgctcctttagttttagatattgtacgatatgaggaaccggactttgctgaactggcctttatttgtgctgcttactttggtgaacctcaggtaatgtatttgctctacaaatatatgcctctgacccgcgcagttcttacggatgccatccggataagtcttgagagtaacaaccaggtagggatttgctatgcttacttgatgggaggcagcctcaagggactagtctccgccccactgcgtaaacgtctgtgcgccaaactacgctcgcagcgcaaaaagaaggacgttctttcaccccacgacttcttactgctgctccagtaa

SEQ ID NO: 299 - DNA, 774 bp, African swine fever virus
atgcaaaataaaatcccaaattttaaccttttctttttttttctatacaagatgttagaaatagtattggcaacgctgctaggtgatctgcagaaacttaaagatcttacacctatgcagcgggctgtggctttctttcgagccaacactaaagagctagaggacttcctctgccccgatgggcagtctgaggagttactccctggacttctccttaaccgtttattagaaccttcaggtcctattgacattttaaccggttaccacctatttcgtgagaatccgaaggcaggtcggctgcgtggccttgaggtcaagctgcttgaacggttatatgatgctaacatctacaatatattggcccagctacggcctgagttggttcgcaataaggctgttgagttatattggctctttcgggctattttgatgtgtcatggtcccttagttttggagattgtacgacatgagacaatggattttgcagaattagcctttatctgtgctgcttactttagtgaacctcaggtaatgtacgctatttataaatttatacctatctcttgcgcagtccttgctgatgccattcagatgtgtcttgagagtaacagcgaggcggggatttgctatgcttacctaatggggggtagcctcaagggcaaggtgcctggcgcgctgcgcaaacgtctgcgtgccagtccacttcggcaagagcgcaaaaagaaaaacgttcttccaccccatgaattcctactcatgcttcatgggatttaa

SEQ ID NO: 300 - DNA, 723 bp, African swine fever virus
atgttagaaatagtattggcaacgctgctaggtgatctgcagaagcttagggatcttacacctatgcagcgggctgtggctttctttcgagtcaacactaaagagctagaggacttcctctaccccgatgggcagtctgaggagttgctccctggacttctccttaaccgtttactagaaccttcaggccctattgacattttaaccggttaccacctatttcgtgagaacccaaaggcaggtcggctgcgtggccttgaggttaagctgcttgaacggttatatgatgctaacatctacaatatgttggcccaaatacgacctgagttggttcgtatcaaggctattgagttatattggctctttcgggctattttaatgtgtcatagtcccttagttttggagattgtacgacatgagacaatggattttgcagaattagcctttatctgtgctgcttactttagtgaacctcaggtaatgtacgctctttataaatttatacctatttctcgcgcagtccttgctgatgccatcgagatgtctcttgagagcaacagcgagacggggatttgctatgcctacctaatggggggtagcctcaagggcaaggtgcccggcccgctgcgcaaacgtctgcgtgccagtccacttcggcaagagcgcaaaaagaaaaacgtccttccgccccatgaatttctactcatgctccatgggatttaa

SEQ ID NO: 301 - protein, 237 aa, African swine fever virus
MLEIVLATLLGDLQRLRVLTPQQRAVAFFRANTKELEDFLCSDGQSEEVLSGPLLNRLLEPSGPLDILTGYHLFRQNPKAGQLRGLEVKMLERLYDANIYNILSRLRPEKVRNKAIELYWVFRAIHICHAPLVLDIVRYEEPDFAELAFICAAYFGEPQVMYLLYKYMPLTRAVLTDAIRISLESNNQVGICYAYLMGGSLKGLVSAPLRKRLRAKLRSQRKKKDVLSPHDFLLLLQ

SEQ ID NO: 302 - protein, 237 aa, African swine fever virus; identical to SEQ ID NO: 301

SEQ ID NO: 303 - protein, 257 aa, African swine fever virus
MQNKIPNFNLFFFFLYKMLEIVLATLLGDLQKLKDLTPMQRAVAFFRANTKELEDFLCPDGQSEELLPGLLLNRLLEPSGPIDILTGYHLFRENPKAGRLRGLEVKLLERLYDANIYNILAQLRPELVRNKAVELYWLFRAILMCHGPLVLEIVRHETMDFAELAFICAAYFSEPQVMYAIYKFIPISCAVLADAIQMCLESNSEAGICYAYLMGGSLKGKVPGALRKRLRASPLRQERKKKNVLPPHEFLLMLHGI

SEQ ID NO: 304 - protein, 257 aa, African swine fever virus
MQNKIPNFNLFFFFLYKMLEIVLATLLGDLQQLKDLTPKQRAVAFFRANTKELEDFLYPDGQTEELLPGFLLNHLLEPSGPIEILTGYHLFRQNPKAGRLRGLEVKMLERLYDANIYNMLARLRPELVRDKAVELYWLFRAILICHGPLVLEIVRHETLDFAETAFICAAYFSEPQVMYALYNFIPPTHAVLADAIQMCLESNSEAGICYVYLMGGNLKGKVPGSLRKRLRASPLRQERKKKNVLPPHEFLLLLHGI

SEQ ID NO: 305 - protein, 254 aa, African swine fever virus
MQNKIPNFNLFFFFLYRMLEIVLATLLGDLQRLRVLTPQQRAVAFFRANTKELEDFLRSDGQSEEILSGPLLNRLLEPSCPLDILTGYHLFRQNPKAGQLRGLEVKMLERLYDANIYNILSRLRPEKVRNKAIELYWVFRAIHICHAPLVLDIVRYEEPDFAELAFICAAYFGEPQVMYLLYKYMPLTRAVLTDAIQISLESNNQVGICYAYLMGGSLKGLVSAPLRKRLRAKLRSQRKKKDVLSPHDFLLLLQ

SEQ ID NO: 306 - protein, 123 aa, African swine fever virus
MLVIFLGLLGLLANQVLGLPNQPAGQLHPTDNPPKEELGYWCTYTESCKFCWNCQNGLCEGKLENTTILENEYVQSCIVSRWLNKCMYDLGQGIDHVMACSEPKPWNPYKILKREWKKNVSQN

SEQ ID NO: 307 - protein, 123 aa, African swine fever virus
MLVIFLGLLGLLANQVLGLPNQPAGQLHPTDNPPKEELGYWCTYTESCKFCWNCQNGLCEGKLENTTILENEYVQSCIVSRWLNKCMYDLGQGIHHVMPCSEPKPWNPYKILKKEWKENVSQN

SEQ ID NO: 308 - protein, 120 aa, African swine fever virus
MLVIFLGILGLLANQVSSQLVGQLHPTENPSENELEYWCTYMECCQFCWDCQDGLCVNKLGNTTILENEYVHPCIVSRWLNKCMYDLGQGIDHVMVCSQPKYWNPYKILKKEWKENNSQN

SEQ ID NO: 309 - protein, 120 aa, African swine fever virus; identical to SEQ ID NO: 308

SEQ ID NO: 310 - protein, 121 aa, African swine fever virus
MLVIFLGILGLLANQVSSQLVGQLHPTENPSENELEYWCTYMECCQFCWDCQNGLCVNKLGNTTILENEYVHPCIVSRWLNKCMYDLGQGIDHVMVCSQPKYWNPYKILKKEWKENNSQNK

SEQ ID NO: 311 - protein, 118 aa, African swine fever virus
MLVIFLGILGLLVNQVSSQPVGQLHPTENPSENELEYWCTYMECCQFCWDCQNGLCVNKLGNTTILENEYVHPCIVSRWLNKCMYDLGQGIDHVMVCSQPKYWNPYKILKKEWKENNS

SEQ ID NO: 312 - protein, 121 aa, African swine fever virus; identical to SEQ ID NO: 310

SEQ ID NO: 313 - protein, 121 aa, African swine fever virus; identical to SEQ ID NO: 310

SEQ ID NO: 314 - protein, 205 aa, African swine fever virus
MLVIFLGILGLLASQVSSQLVGQLRPTEEPPEEELEYWCAYMESCQFCWDCQDGTCINKIDGSVIYKNEYVKSCLVSRWLDKCMYDLDKGIYHTMNCNQVLGLPNQPAGQLHPTDNPPQEELEYWCTYTENCKFCWNCQNGLCEGKLENTTILENEYVQSCIVSRWLNKCMYDLGQGIHHVMACSEPKPWNPYKILKREWKENNS

SEQ ID NO: 315 - protein, 205 aa, African swine fever virus; identical to SEQ ID NO: 314

SEQ ID NO: 316 - protein, 103 aa, African swine fever virus; identical to SEQ ID NO: 2

SEQ ID NO: 317 - protein, 119 aa, African swine fever virus
MKVFLGLLLGYSTILILTYQSPTTPWCFYEISLKIPNHHSMKCCSYPRLYEHEMFMEKWRDKNWPIIIRYYCFYLVFSFVFAGCVAFAICKNLRLSTTMKLLMLLSILVLLLSQPILNN

SEQ ID NO: 318 - protein, 119 aa, African swine fever virus; identical to SEQ ID NO: 317

SEQ ID NO: 319 - protein, 168 aa, African swine fever virus
MKVFLGLLLGFSIILILTYQSPTTQHPPKEELAYWCTYAKSCDFCWDCQNDTCINKVINESISITSIVNCRVTRDSQSCFYEISVKIPNHHSMECSYPRLYEHEMFMEKWRDEYWPIIIKQCCFYLVFSIAFAGCVAFAICKNLRLRTTIKLLILLSILVWLSQPVLN

SEQ ID NO: 320 - protein, 171 aa, African swine fever virus
MKVFLALLLGYLTILILTYQTPTTQHPPKEELPYWCTYVKNCDLCWDCQDSIYWNKVISESISINSIINCRVTCDSQSQSCFYEILLKIPNHHSMECSYPGSYENEMFMEKWRDENWSIIIKHYCFYLVFSFAFAGCVAFAICKNLRLSTTMKLLMLLSILVCLSQPILNN

SEQ ID NO: 321 - protein, 169 aa, African swine fever virus
MKVFLGLLLGFSIILILTYQSPTTQHPPKEELAYWCTYAKSCDFCWDCQNDTCINKVINESISITSIVNCRVTRDSQSCFYDISVKIPNHHSMECSYPRLYEHEMFMEKWRDEYWPIIIKQCCFYLVFSFAFAGCVAFAICKNLRLRTTIKLLILLSILVWLSQPILNN

SEQ ID NO: 322 - protein, 103 aa, African swine fever virus; identical to SEQ ID NO: 2

SEQ ID NO: 323 - protein, 171 aa, African swine fever virus
MKVFLGLLLGYSTILILTYQSPTTQHPPKEELEYWCTYAKTCDFCWDCQNDTCINKVINESISMNSIVNCRVTRDSQSQSCFYEISLKIPNYHSMECSYPRLYKHFMSMEKWRDENWPILIRHYCFYLVFSFAFAGCVAFAICKNLRLRTTMKLLMLLSILVLLSQPILNN

SEQ ID NO: 324 - protein, 107 aa, African swine fever virus
MNATMKVFLGLLLGYSTILILTYQSPTTQWCFYEISLKILNHHSMEKWRDKNWSIIIRYYCFYLVFSFAFAGCVAFAICKNLRLCTTMKLLMLLGILVLLSQPILNN

SEQ ID NO: 325 - protein, 117 aa, African swine fever virus
MKVFLGLLLGYSTILILTYQSPATQWCFYEISLKIPNHHSMECSYPRLYKHFIFMEKWRDKNWSIIIRYYCFYLVFSFAFAGCIAFAICKNLRLCTTMKLLMLLSILVLLSQPILNN

SEQ ID NO: 326 - protein, 117 aa, African swine fever virus
MKVFLGLLLGYSTILILTYQSPATQWCFYEISLKIPNHHSMECSYPRLYKHFMFMKKWRDKNWSIIIRYYCFYLVFSFAFAGCIAFAICKNLRLCTTMKLLMLLSILVLLSQPILNN

SEQ ID NO: 327 - DNA, 438 bp, African swine fever virus
atggatcattatcttaaaaaattacaagatatttatacgaagctcgagggccatccctttctttttagcccgtcgaaaaccaatgaaaaagagtttattactctgctaaaccaggccttggcctcaacgcagctttaccgcagcatacaacagctgtttttaacgatgtataagctagatcccattgggtttattaactatattaaaacgagtaaacaagagtatttatgcctgttgattaatcctaaactcgttactaagtttttaaaaataacgagctttaaaatttacattaatttcagactgaaaactttttatataagtcctaataagtataataatttttacactgctccctctgaagaaaagactaaccatctcctaaaagaagaaaaaacttgggcaaagattgttgaagaaggaggagaagaatcctaa

SEQ ID NO: 328 - DNA, 438 bp, African swine fever virus
atggatcattatcttaaaaaattacaagatatttatacgaagctcgagggtcatccctttctttttagcccgtcgaaaaccaatgaaaaagagtttattactctgctaaaccaggccttggcctcaacgcagctttaccgcagcatacaacagctgtttttaacgatgtataagctagatcccattgggtttattaactatattaaaacgagtaaacaagagtatttatgcctgttaattaatcctaaactcgttactaagtttttaaaaataacgagctttaaaatttacattaatttcaggctgaaaactttttatataagtcctaataagtataataatttttacaccgctccctctgaagaaaagactaaccatcttctaaaagaagaaaaaacttgggcaaagattgttgaagaaggaggagaagaatcctaa

SEQ ID NO: 329 - DNA, 438 bp, African swine fever virus; identical to SEQ ID NO: 328

SEQ ID NO: 330 - DNA, 438 bp, African swine fever virus
atggatcattatcttaaaaaattacaggatatttataagaagcttgagggtcacccctttctttttagtccgtcgaaaaccaatgaaaaagagtttattactctgctaaaccaagccttggcctcgacgcagctttaccgcagcatacaacagctgtttttaacgatgtataagctagatcccattgggtttgttaactatattaaagcgagtaaacaagagtatttatgtctgttgattaatcctaaactagtcactaagtttttaaaaataacgagctttaaaatttacattaattttaggctgaaaactttttatataagtcctaataagtataataatttttacatcgctccctctgaagaaaaggccaatcatctcctaaaagaagaaaaaacctgggcaaagattgttgaagaaggaggagaagaatcctaa

SEQ ID NO: 331 - DNA, 438 bp, African swine fever virus
atggatcattatcttaaaaaattacaggatatttataagaagcttgagggtcacccctttctttttagtccgtcgaaaaccaatgaaaaagagtttattactctgctaaaccaagccttggcctcgacgcagctttaccgcagcatacaacagctgtttttaacgatgtataagctagatcccattgggtttgttaactatattaaagcgagtaaacaagagtatttatgtctgttgattaatcctaaactagtcactaagtttttaaaaataacgagctttaaaatttacattaatttcaggctaaaaactttctatataagtcctaataagtataataatttttacatcgctccctctgaagaaaaggccaatcatctcctaaaagaagaaaaaacctgggcaaagattgttgaagaaggaggagaagaatcctaa

SEQ ID NO: 332 - DNA, 438 bp, African swine fever virus; identical to SEQ ID NO: 330

SEQ ID NO: 333 - DNA, 438 bp, African swine fever virus; identical to SEQ ID NO: 327

SEQ ID NO: 334 - DNA, 438 bp, African swine fever virus
atggatcattatcttaaaaaattagaggatatttataaaaagcttgagggtcatccctttctttttagtccgtcgaaaaccaatgaaaaagagtttattactctgttaaaccaagccttggcctcaacgcagctttatcgcagcatacaacagctgtttttaacgatgtataagctagatcccattgggtttattaactatattaaaacgagtaaacaagagtatttatgcctgttgatcaatcctaaactagttacgaagtttttaaaaataacgagttttaaaatttacattaatttcaggctgaaaactttttatataagtcctaataaatataataatttttacaccgctccctctgaagaaaaggccaatcatctcctaaaagaagaaaaaacctgggcaaagattgttgaagaaggaggagaagaatcctaa

SEQ ID NO: 335 - DNA, 441 bp, African swine fever virus
atggatcattatcttaaaaaattacaagatatttatacgaagctcgagggccatccctttctttttagcccgtcgaaaaccaatgaaaaagagtttattactctgctaaaccaggccttggcctcaacgcagctttaccgcagcatacaacagctgtttttaacgatgtataagctagatcctatagggtttattaactatattaaaacgagtaaacaagagtatttatgcctgttgattaatcctaaactcgttactaagtttttaaaaataacgagctttaaaatttacattaatttcagactgaaaactttttatataagtcctaataagtataataatttttacaccgctccctctgaagaaaagaccaaccatctcctaaaagaagaaaaaacttgggcaaagattgttgaagaaggaggaggagaagaatcctaa

SEQ ID NO: 336 - DNA, 438 bp, African swine fever virus
atggatcattatcttaaaaaattacaagaaatttatacgaagctcgagggccatccctttctttttagcccgtcgaaaaccaatgaaaaagagtttattactctgctaaaccaggccttggcctcaacgcagctttatcgcagcatacaacagctgtttttaacgatgtataagctagatcccattgggtttattaactatattaaaacgagtaaacaagagtatttatgcctgttgattaatcctaaactcgtcactaagtttttaaaaataacgagctttaaaatttacattaatttcagactgaaaactttttatataagtcctaataagtataataatttttacaccgctccctctgaagaaaagaccaaccatctcctaaaagaagaaaaaacttgggcaaagattgttgaagaaggaggagaagaatcctaa

SEQ ID NO: 337 - DNA, 438 bp, African swine fever virus
atggatcattatcttaaaaaattacaagatatttatacgaagctcgagggtcatccctttctttttagcccgtcgaaaaccaatgaaaaagagtttattactctgctaaaccaggccttggcctcaacgcagctttaccgcagcatacaacagctgtttttaacgatgtataagctagatcccattgggtttattaactatattaaaacgagtaaacaagagtatttatgcctgttgattaatcctaaactcgttactaagtttttaaaaataacgagctttaaaatttacattaatttcagactgaaaactttttatataagtcctaataagtataataatttttacaccgctccctctgaagaaaagactaaccatctcctaaaagaagaaaaaacttgggcaaagattgttgaagaaggaggagaagaatcctaa

SEQ ID NO: 338 - DNA, 441 bp, African swine fever virus; identical to SEQ ID NO: 335

SEQ ID NO: 339 - DNA, 438 bp, African swine fever virus
atggatcattatcttaaaaaattacaagatatttatacgaagctcgagggccatccctttctttttagcccgtcgaaaaccaatgaaaaagagtttattactctgctaaaccaggccttggcctcaacgcagctttaccgcagcatacaacagctgtttttaacgatgtataagctagatcccattgggtttattaactatattaaaacgagtaaacaagagtatttatgcctgttgattaatcctaaactcgtcactaagtttttaaaaataacgagctttaaaatttacattaatttcagactgaaaactttttatataagtcctaataagtataataatttttacaccgctccctctgaagaaaagaccaaccatctcctaaaagaagaaaaaacttgggcaaagattgttgaagaaggaggagaagaatcctaa

SEQ ID NO: 340 - protein, 145 aa, African swine fever virus
MDHYLKKLQDIYTKLEGHPFLFSPSKTNEKEFITLLNQALASTQLYRSIQQLFLTMYKLDPIGFINYIKTSKQEYLCLLINPKLVTKFLKITSFKIYINFRLKTFYISPNKYNNFYTAPSEEKTNHLLKEEKTWAKIVEEGGEES

SEQ ID NO: 341 - protein, 145 aa, African swine fever virus; identical to SEQ ID NO: 340

SEQ ID NO: 342 - protein, 145 aa, African swine fever virus; identical to SEQ ID NO: 340

SEQ ID NO: 343 - protein, 145 aa, African swine fever virus
MDHYLKKLQDIYKKLEGHPFLFSPSKTNEKEFITLLNQALASTQLYRSIQQLFLTMYKLDPIGFVNYIKASKQEYLCLLINPKLVTKFLKITSFKIYINFRLKTFYISPNKYNNFYIAPSEEKANHLLKEEKTWAKIVEEGGEES

SEQ ID NO: 344 - protein, 145 aa, African swine fever virus; identical to SEQ ID NO: 343

SEQ ID NO: 345 - protein, 145 aa, African swine fever virus; identical to SEQ ID NO: 343

SEQ ID NO: 346 - protein, 145 aa, African swine fever virus; identical to SEQ ID NO: 340

SEQ ID NO: 347 - protein, 145 aa, African swine fever virus
MDHYLKKLEDIYKKLEGHPFLFSPSKTNEKEFITLLNQALASTQLYRSIQQLFLTMYKLDPIGFINYIKTSKQEYLCLLINPKLVTKFLKITSFKIYINFRLKTFYISPNKYNNFYTAPSEEKANHLLKEEKTWAKIVEEGGEES

SEQ ID NO: 348 - protein, 146 aa, African swine fever virus
MDHYLKKLQDIYTKLEGHPFLFSPSKTNEKEFITLLNQALASTQLYRSIQQLFLTMYKLDPIGFINYIKTSKQEYLCLLINPKLVTKFLKITSFKIYINFRLKTFYISPNKYNNFYTAPSEEKTNHLLKEEKTWAKIVEEGGGEES

SEQ ID NO: 349 - protein, 145 aa, African swine fever virus
MDHYLKKLQEIYTKLEGHPFLFSPSKTNEKEFITLLNQALASTQLYRSIQQLFLTMYKLDPIGFINYIKTSKQEYLCLLINPKLVTKFLKITSFKIYINFRLKTFYISPNKYNNFYTAPSEEKTNHLLKEEKTWAKIVEEGGEES

SEQ ID NO: 350 - protein, 145 aa, African swine fever virus; identical to SEQ ID NO: 340

SEQ ID NO: 351 - protein, 146 aa, African swine fever virus; identical to SEQ ID NO: 348

SEQ ID NO: 352 - protein, 145 aa, African swine fever virus; identical to SEQ ID NO: 340

SEQ ID NO: 353 - DNA, 378 bp, African swine fever virus
atggcggtttatgcgaaggatcttgataataacaaagagttaaaccaaaaattaattaacgatcagcttaaaattattgacacgctcttgctagcagaaaaaaaaaactttttggtgtatgaattgcctgccccttttgacttttcctccggcgaccctttggccagtcagcgcgacatatactatgccatcataaaaagcctcgaggagcgcgggtttactgtcaaaatatgtatgaaaggggatcgtgccctccttttcatcacttggaaaaaaatacaatccattgagataaacaaaaaagaagaatatctgcgcatgcacttcatacaagacgaagagaaagcattttattgtaaatttttagagtctagatga

SEQ ID NO: 354 - DNA, 378 bp, African swine fever virus
atggcggtttatgcgaaggatcttgataataacaaagagttaaaccaaaaattaattaacgatcagcttaaaattattgacacgctcttgctggcagaaaaaaaaaactttttggtgtatgaactacctgccccttttgacttttcctccggcgaccctttggccagtcagcgcgacatatactatgccatcataaaaagcctcgaggagcgcgggtttactgtcaaaatatgtatgaaaggggatcgtgccctccttttcatcacctggaaaaaaatacaatccattgagataaacaaaaaagaagaatatctgcgcatgcacttcatacaagacgaagagaaagcattttattgtaaatttttagagtctagatga

SEQ ID NO: 355 - DNA, 378 bp, African swine fever virus; identical to SEQ ID NO: 354

SEQ ID NO: 356 - DNA, 378 bp, African swine fever virus
atggcggtttatgcgaaggaccttgataataacaaagagttaaaccaaaaattgatcaacgatcagcttaaaatcattgacacgcttttgctagcagaaaaaaaaaactttttggtgtacgaactacctgcccattttgacttttcctccggcgaccctttgggcagtcagcgcgacatttactatgccatcataaaaagtctcgaggagcgcggatttactgtcaaaatatgtatgaagggagaccgcgcccttcttttcatcacctggaaaaaaatacaatccattgagatcaacaaaaaagaagaatatctgcgcatgcacttcatacaagacgaagagaaagcgttttattgtaaatttttagagtctagatga

SEQ ID NO: 357 - DNA, 378 bp, African swine fever virus
atggcggtttatgcgaaggaccttgataataacaaagagttaaaccaaaaattgatcaacgatcagcttaaaattattgacacgcttttgctggcagaaaaaaaaaactttttggtgtacgaactacctgcccattttgacttttcctccggcgaccctttgggcagtcagcgcgacatttactatgccatcataaaaagtctcgaggagcgcggatttactgtcaaaatatgtatgaagggagaccgcgcccttcttttcatcacctggaaaaaaatacaatccattgagatcaacaaaaaagaagaatatctgcgcatgcacttcatacaagacgaagagaaagcgttttattgtaaatttttagagtctagatga

SEQ ID NO: 358 - DNA, 378 bp, African swine fever virus; identical to SEQ ID NO: 356

SEQ ID NO: 359 - DNA, 378 bp, African swine fever virus; identical to SEQ ID NO: 353

SEQ ID NO: 360 - DNA, 378 bp, African swine fever virus
atggcagtttatgcgaaagatcttgataataacaaagagttaaaccaaaaattaattaacgatcaacttaaaattattgacacgctgttgctggcagaaaaaaaaaactttttggtgcatgaactacctgcccactatgacttttcctccggcgaccctttggccagtcagcgcgacatatactatgccatcataaaaagtctcgaggagcgcggatttactgtcaaaatttgtatgaaaggagatcgcgcccttcttttcatcacctggaaaaaaatacaatccattgagataaacaaaaaagaagaatatctgcgcatgcacttcatacaagatgaagagaaagcattttattgtaaatttttagagtctagatga

SEQ ID NO: 361 - DNA, 378 bp, African swine fever virus; identical to SEQ ID NO: 353

SEQ ID NO: 362 - DNA, 378 bp, African swine fever virus
atggcggtttatgcgaaggatcttgataataacaaagagttaaaccaaaaattaattaacgatcagcttaaaattattgacacgctcttgctggcagaaaaaaaaaactttttggtgtatgaactacctgccccttttgacttttcctccggcgaccctttggccagtcagcgcgacatatactatgccatcataaaaagtctcgaggagcgcgggtttactgtcaaaatatgtatgaaaggggatcgcgccctccttttcatcacctggaaaaaaatacaatccattgagataaacaaaaaagaagaatatctgcgcatgcacttcatacaagacgaagagaaagcattttattgtaaatttttagagtctagatga

SEQ ID NO: 363 - DNA, 378 bp, African swine fever virus
atggcggtgtatgcgaaggaccttgataataacaaagagttaaaccaaaaattaattaacgatcagcttaaaattattgacacgctcttgctggcagaaaaaaaaaactttttggtgtatgaactacctgccccttttgacttttcctccggcgaccctttggccagtcagcgtgacatatactatgccatcataaaaagtcttgaggagcgcgggtttactgtcaaaatatgtatgaaaggggatcgtgccctccttttcatcacctggaaaaaaatacaatccattgaaataaacaaaaaagaagaatatctgcgcatgcacttcatacaagacgaagagaaatcattttattgtaaatttttagagtctagatga

SEQ ID NO: 364 - DNA, 378 bp, African swine fever virus; identical to SEQ ID NO: 362

SEQ ID NO: 365 - DNA, 378 bp, African swine fever virus
atggcggtttatgcgaaggaccttgataataacaaagagttaaaccaaaaattaattaacgatcagcttaaaattattgacacgctcttgctggcagaaaaaaaaaactttttggtgtatgaactacctgccccttttgacttttcctccggcgaccctttggccagtcagcgcgacatatactatgccatcataaaaagtctcgaggagcgcgggtttactgtcaaaatatgtatgaaaggggatcgcgccctccttttcatcacctggaaaaaaatacaatccattgagataaacaaaaaagaagaatatctgcgcatgcacttcatacaagacgaagagaaagcattttattgtaaatttttagagtctagatga

SEQ ID NO: 366 - protein, 125 aa, African swine fever virus
MAVYAKDLDNNKELNQKLINDQLKIIDTLLLAEKKNFLVYELPAPFDFSSGDPLASQRDIYYAIIKSLEERGFTVKICMKGDRALLFITWKKIQSIEINKKEEYLRMHFIQDEEKAFYCKFLESR

SEQ ID NO: 367 - protein, 125 aa, African swine fever virus; identical to SEQ ID NO: 366

SEQ ID NO: 368 - protein, 125 aa, African swine fever virus; identical to SEQ ID NO: 366

SEQ ID NO: 369 - protein, 125 aa, African swine fever virus
MAVYAKDLDNNKELNQKLINDQLKIIDTLLLAEKKNFLVYELPAHFDFSSGDPLGSQRDIYYAIIKSLEERGFTVKICMKGDRALLFITWKKIQSIEINKKEEYLRMHFIQDEEKAFYCKFLESR

SEQ ID NO: 370 - protein, 125 aa, African swine fever virus; identical to SEQ ID NO: 369

SEQ ID NO: 371 - protein, 125 aa, African swine fever virus; identical to SEQ ID NO: 369

SEQ ID NO: 372 - protein, 125 aa, African swine fever virus; identical to SEQ ID NO: 366

SEQ ID NO: 373 - protein, 125 aa, African swine fever virus
MAVYAKDLDNNKELNQKLINDQLKIIDTLLLAEKKNFLVHELPAHYDFSSGDPLASQRDIYYAIIKSLEERGFTVKICMKGDRALLFITWKKIQSIEINKKEEYLRMHFIQDEEKAFYCKFLESR

SEQ ID NO: 374 - protein, 125 aa, African swine fever virus; identical to SEQ ID NO: 366

SEQ ID NO: 375 - protein, 125 aa, African swine fever virus; identical to SEQ ID NO: 366

SEQ ID NO: 376 - protein, 125 aa, African swine fever virus
MAVYAKDLDNNKELNQKLINDQLKIIDTLLLAEKKNFLVYELPAPFDFSSGDPLASQRDIYYAIIKSLEERGFTVKICMKGDRALLFITWKKIQSIEINKKEEYLRMHFIQDEEKSFYCKFLESR

SEQ ID NO: 377 - protein, 125 aa, African swine fever virus; identical to SEQ ID NO: 366

SEQ ID NO: 378 - protein, 125 aa, African swine fever virus; identical to SEQ ID NO: 366

SEQ ID NO: 379 - protein, 360 aa, African swine fever virus
MIILIFLIFSNIVLSIDYWVSFNKTIILDSNITNDNNDINGVSWNFFNNSFNTLATCGKAGNFCECSNYSTSIYNITNNCSLTIFPHNDVFDTTYQVVDNQIINYTIKLLTPATPPNITYNCTNFLITCKKNNGTNTNIYLNINDTFVKYTNESILEYNWNNSNINNFTATCIINNTISTSNETTLINCTYLTLSSNYFYTFFKLYYIPLSIIIGITISILLISIITFLSLRKRKKHVEEIESPPPESNEEEQCQHDDTTSIHEPSPREPLLPKPYSRYQYNTPIYYMRPSTQPLNPFPLPKPCPPPKPCPPPKPCPPPKPCPSAESYSPPKPLPSIPLLPNIPPLSTQNISLIHVDRII

SEQ ID NO: 380 - protein, 203 aa, African swine fever virus
MIILIFLIFSNIVLSIDYWVSFNKTIILDSNITNDNNDINGVSWNFFNNSFNTLATCGKAGNFCECSNYSTSIYNITNNCSLTIFPHNDVFDTTYQVVWNQIINYTIKLLTPATPPNITYNCTNFLITCKKNNGTNTNIYLNINDTFVKYTNESILEYNWNNSNINNFTATCIINNTISTSNETTLINCTYLTLSSNYFYTFF

SEQ ID NO: 381 - protein, 210 aa, African swine fever virus
MIIILIFLICLKIVLNNNIIIWHTLNETIFLNNSITFTDNLGGLFWNTYYNNNHSILTSCGIYQNYCSCTNNYSTSLYNITNNCGLIIFPNNTKRFNTTYELVYLNNSTKYTINLLVPVTPPNITYNCTTSVITCKKNDGTNTNMFLKINDTIVKSSNESVFEYSWNSTDLNNNFTAICIINNTINSSNDTQTIECPNILLNNYLDFFQV

SEQ ID NO: 382 - protein, 207 aa, African swine fever virus
MIIILIFLIYLKLVLNNNIIIWHPTLNETIFLNVTTIGNISGLFWNTYYNNNRSELTKCGIYNNYCSCDSLNTSLYNINNCSLVIFPNNTKIFNTIYELIYSGNQTNYTIKLLESTTPPNITYNCTTSVITCKKNNGTNTNIFLTINNTIVNSTNEDVIYYYWNRSEFNNFTATCMINNTINSSNISEIIDCTNTLLLNSYLDFFQV

SEQ ID NO: 383 - protein, 211 aa, African swine fever virus
MIIKVIFLVFFKMVLSNIIIWSTLNNTIYLNINYSDSNLYTGLFWNKYYNNTRNNFTTCVTSNSSYCTCKGHNTSLYNITNNCSLIIFPNNTKIFNTTYELVYLNNKINYTIQMVQPVDPPIIIYNDTNNSLITCEKNNGTNTEIYLYLNDTFINNTNENSIKYYWNCSELNHNITTTCIINNTLNSANTTKVINCTNLLLKSDQNYFLKN

SEQ ID NO: 384 - protein, 205 aa, African swine fever virus
MIIKLIFLICFKIVLSINYWVRYNDTVTLNSNINSETEGIFWNFYNNTFNTIATCGKKNNVCECSNYDKSLYNITNNCSLTIFPNNTKIFNTTYQLVYSRNRINYTINLLLPVTSPIITYNCTQSLITCEKTNGTNIHLFLNLNDTINEYTNKSFLNYYWNSSELNNIFLATCIINNTLNSANTTKVINCTNPLLKSYQNYFLEN

SEQ ID NO: 385 - protein, 203 aa, African swine fever virus; identical to SEQ ID NO: 380

SEQ ID NO: 386 - protein, 204 aa, African swine fever virus
MIIILIFLIIPNIVLSIDYWVSFNKTIILDSNITNDNNDINGVSWNFLNNSLNTLATCGKAGNFCECSNYSTSLYNIAHNCSLTIFPHNDVFGTPYQVVWNQIINYTIKLLTPVTPPNITYNCTNFLITCKKNNGTNTIIYFNINDTNVKYTNESILEYNWNNSNFNNFTATCIINNTINSSNDTQTIDCINTLLSSYLDFFQV
